United States Patent Application Publication US 2022/0211838 A1 - sequence listing, part 17

SEQ ID NO: 26924 - RNA, 4283 nt, Artificial Sequence
  SARS-CoV-2/Wuhan/WIV05/2019__EPI_ISL_402128 spike protein mRNA gc mod (1-1273)(K986P_V987P_K986P_V987P_S13I_W152C_L452R_D614G)
agaauaaacuaguauucuucugguccccacagacucagagagaacccgccaccauguucguguuccuggugcugcugccucugguguccauccagugugugaaccugaccaccagaacacagcugccuccagccuacaccaacagcuuuaccagaggcguguacuaccccgacaagguguucagauccagcgugcugcacucuacccaggaccuguuccugccuuucuucagcaacgugaccugguuccacgccauccacguguccggcaccaauggcaccaagagauucgacaaccccgugcugcccuucaacgacgggguguacuuugccagcaccgagaaguccaacaucaucagaggcuggaucuucggcaccacacuggacagcaagacccagagccugcugaucgugaacaacgccaccaacguggucaucaaagugugcgaguuccaguucugcaacgaccccuuccugggcgucuacuaccacaagaacaacaagagcugcauggaaagcgaguuccggguguacagcagcgccaacaacugcaccuucgaguacgugucccagccuuuccugauggaccuggaaggcaagcagggcaacuucaagaaccugcgcgaguucguguuuaagaacaucgacggcuacuucaagaucuacagcaagcacaccccuaucaaccucgugcgggaucugccucagggcuucucugcucuggaaccccugguggaucugcccaucggcaucaacaucacccgguuucagacacugcuggcccugcacagaagcuaccugacaccuggcgauagcagcagcggauggacagcuggugccgccgcuuacuaugugggcuaccugcagccuagaaccuuccugcugaaguacaacgagaacggcaccaucaccgacgccguggauugugcucuggauccucugagcgagacaaagugcacccugaaguccuucaccguggaaaagggcaucuaccagaccagcaacuuccgggugcagcccaccgaauccaucgugcgguuccccaauaucaccaaucugugccccuucggcgagguguucaaugccaccagauucgccucuguguacgccuggaaccggaagcggaucagcaauugcguggccgacuacuccgugcuguacaacuccgccagcuucagcaccuucaagugcuacggcguguccccuaccaagcugaacgaccugugcuucacaaacguguacgccgacagcuucgugauccggggagaugaagugcggcagauugccccuggacagacaggcaagaucgccgacuacaacuacaagcugcccgacgacuucaccggcugugugauugccuggaacagcaacaaccuggacuccaaagucggcggcaacuacaauuaccgcuaccggcuguuccggaaguccaaucugaagcccuucgagcgggacaucuccaccgagaucuaucaggccggcagcaccccuuguaacggcguggaaggcuucaacugcuacuucccacugcaguccuacggcuuucagcccacaaauggcgugggcuaucagcccuacagagugguggugcugagcuucgaacugcugcaugccccugccacagugugcggcccuaagaaaagcaccaaucucgugaagaacaaaugcgugaacuucaacuucaacggccugaccggcaccggcgugcugacagagagcaacaagaaguuccugccauuccagcaguuuggccgggauaucgccgauaccacagacgccguuagagauccccagacacuggaaauccuggacaucaccccuugcagcuucggcggagugucugugaucaccccuggcaccaacaccagcaaucagguggcagugcuguaccagggcgugaacuguaccgaagugcccguggccauucacgccgaucagcugacaccuacauggcggguguacuccaccggcagcaauguguuucagaccagagccggcugucugaucggagccgagcacgugaacaauagcuacgagugcgacauccccaucggcgcuggaaucugcgccagcuaccagacacagacaaacagcccucggagagccagaagcguggccagccagagcaucauugccuacacaaugucucugggcgccgagaacagcguggccuacuccaacaacucuaucgcuauccccaccaacuucaccaucagcgugaccacagagauccugccuguguccaugaccaagaccagcguggacugcaccauguacaucugcggcgauuccaccgagugcuccaaccugcugcugcaguacggcagcuucugcacccagcugaauagagcccugacagggaucgccguggaacaggacaagaacacccaagagguguucgcccaagugaagcagaucuacaagaccccuccuaucaaggacuucggcggcuucaauuucagccagauucugcccgauccuagcaagcccagcaagcggagcuucaucgaggaccugcuguucaacaaagugacacuggccgacgccggcuucaucaagcaguauggcgauugucugggcgacauugccgccagggaucugauuugcgcccagaaguuuaacggacugacagugcugccuccucugcugaccgaugagaugaucgcccaguacacaucugcccugcuggccggcacaaucacaagcggcuggacauuuggagcaggcgccgcucugcagauccccuuugcuaugcagauggccuaccgguucaacggcaucggagugacccagaaugugcuguacgagaaccagaagcugaucgccaaccaguucaacagcgccaucggcaagauccaggacagccugagcagcacagcaagcgcccugggaaagcugcaggacguggucaaccagaaugcccaggcacugaacacccuggucaagcagcuguccuccaacuucggcgccaucagcucugugcugaacgauauccugagcagacuggacccuccugaggccgaggugcagaucgacagacugaucacaggcagacugcagagccuccagacauacgugacccagcagcugaucagagccgccgagauuagagccucugccaaucuggccgccaccaagaugucugagugugugcugggccagagcaagagaguggacuuuugcggcaagggcuaccaccugaugagcuucccucagucugccccucacggcgugguguuucugcacgugacauaugugcccgcucaagagaagaauuucaccaccgcuccagccaucugccacgacggcaaagcccacuuuccuagagaaggcguguucguguccaacggcacccauugguucgugacacagcggaacuucuacgagccccagaucaucaccaccgacaacaccuucgugucuggcaacugcgacgucgugaucggcauugugaacaauaccguguacgacccucugcagcccgagcuggacagcuucaaagaggaacuggacaaguacuuuaagaaccacacaagccccgacguggaccugggcgauaucagcggaaucaaugccagcgucgugaacauccagaaagagaucgaccggcugaacgagguggccaagaaucugaacgagagccugaucgaccugcaagaacuggggaaguacgagcaguacaucaaguggcccugguacaucuggcugggcuuuaucgccggacugauugccaucgugauggucacaaucaugcuguguugcaugaccagcugcuguagcugccugaagggcuguuguagcuguggcagcugcugcaaguucgacgaggacgauucugagcccgugcugaagggcgugaaacugcacuacacaugaugacucgagcugguacugcaugcacgcaaugcuagcugccccuuucccguccuggguaccccgagucucccccgaccucgggucccagguaugcucccaccuccaccugccccacucaccaccucugcuaguuccagacaccucccaagcacgcagcaaugcagcucaaaacgcuuagccuagccacacccccacgggaaacagcagugauuaaccuuuagcaauaaacgaaaguuuaacuaagcuauacuaaccccaggguuggucaauuucgugccagccacacccuggagcuagcaaaaaaaaaaaaaaaaaaaaaaaaaaaaaagcauaugacuaaaaaaaaaaaaaaaaaaaaaaaaaaaaaaaaaaaaaaaaaaaaaaaaaaaaaaaaaaaaaaaaaaaaaa

SEQ ID NO: 26925 - RNA, 4019 nt, Artificial Sequence
  SARS-CoV-2/Wuhan/WIV05/2019__EPI_ISL_402128 spike protein mRNA gc (1-1273)(K986P_V987P) R10300
aggagagucccgcagucggcguccagcggcucugcuuguucgugugugugucguugcaggccuuauucaagcuuaccauguucguguuccugguccuccugccccuggugagcucccagugcgugaaccucaccacccgcacgcagcugccgcccgccuacaccaacagcuucacccggggcgucuacuaccccgacaagguguuccgcuccagcgugcugcacuccacccaggaccucuuccugcccuucuucagcaacgucacgugguuccacgccauccacguguccgggaccaacggcaccaagcgguucgacaacccggugcugcccuucaacgacggggucuacuucgcgagcaccgagaaguccaacaucauccgcggcuggaucuucgggacgacccucgacagcaagacccagucccugcugaucgugaacaacgccaccaacguggucaucaaggugugcgaguuccaguucugcaacgaccccuuccucggcguguacuaccacaagaacaacaagagcuggauggaguccgaguuccgggucuacagcuccgccaacaacugcacguucgaguacgugagccagcccuuccugauggaccuggagggcaagcaggggaacuucaagaaccuccgcgaguucguguucaagaacaucgacggcuacuucaagaucuacuccaagcacaccccgaucaaccugguccgggaccugccccagggguucagcgcccucgagccccugguggaccugcccaucggcaucaacaucacccgcuuccagacccuccuggcccugcaccgguccuaccucacgccgggggacagcagcuccggcuggaccgcgggcgccgccgccuacuacgugggguaccugcagccccgcaccuuccugcucaaguacaacgagaacggcaccaucacggacgcggucgacugcgcccuggacccccugagcgagaccaagugcacccucaaguccuucaccguggagaaggggaucuaccagacgagcaacuuccgggugcagcccaccgaguccaucguccgcuucccgaacaucaccaaccugugccccuucggcgagguguucaacgccacccgguucgccagcgucuacgccuggaaccgcaagcggaucuccaacugcguggcggacuacagcgugcuguacaacuccgccagcuucuccacguucaagugcuacggcgucagccccaccaagcucaacgaccugugcuucaccaacguguacgccgacuccuucgugauccgcggggacgagguccggcagaucgcccccggccagaccgggaagaucgccgacuacaacuacaagcugccggacgacuucacgggcugcgugaucgcguggaacagcaacaaccucgacuccaaggucgggggcaacuacaacuaccuguaccgccuguuccgcaagagcaaccucaagcccuucgagcgggacaucuccaccgagaucuaccaggccggcagcacccccugcaacgggguggagggcuucaacugcuacuucccccugcaguccuacggguuccagccgaccaacggcgugggguaccagcccuaccggguggucgugcugagcuucgagcuccugcacgcccccgccacggugugcggccccaagaaguccaccaaccuggucaagaacaagugcgugaacuucaacuucaacggccucaccgggaccggcgugcugaccgagagcaacaagaaguuccugccguuccagcaguucgggcgcgacaucgccgacacgaccgacgcgguccgcgacccccagacccuggagauccucgacaucacccccugcagcuucggcgggguguccgugaucacgccgggcaccaacaccagcaaccaggucgccgugcuguaccaggacgugaacugcaccgagguccccguggccauccacgccgaccagcugacgcccaccuggcggguguacuccaccggcagcaacgucuuccagacccgcgccgggugccucaucggcgcggagcacgugaacaacuccuacgagugcgacauccccaucggggccggcaucugcgccagcuaccagacgcagaccaacuccccgcggcgcgcccggagcguggcgucccagagcaucaucgccuacaccaugucccugggcgccgagaacagcgucgccuacuccaacaacagcaucgccauccccaccaacuucacgaucuccgugaccaccgagauccugcccgugagcaugaccaagacgagcgucgacugcaccauguacaucugcggggacuccaccgagugcagcaaccuccugcugcaguacggcuccuucugcacccagcucaaccgcgcgcugacggggaucgccguggagcaggacaagaacacccaggagguguucgcccaggucaagcagaucuacaagacgcccccgaucaaggacuucggcggguucaacuucagccagauccugcccgaccccuccaagcccagcaagcgguccuucaucgaggaccuccuguucaacaaggugacccuggccgacgccggcuucaucaagcaguacggcgacugccucggggacaucgcggcccgcgaccugaucugcgcccagaaguucaacggccugaccgugcucccgccccugcugaccgacgagaugaucgcccaguacaccagcgcccuccuggcggggaccaucacguccggcuggaccuucggggccggcgccgcccugcagauccccuucgcgaugcagauggccuaccgguucaacggcaucggggucacccagaacgugcucuacgagaaccagaagcugaucgccaaccaguucaacagcgccaucggcaagauccaggacucccugagcuccaccgccagcgcgcucgggaagcugcaggacguggucaaccagaacgcccaggcccugaacacgcucgugaagcagcuguccagcaacuucggcgccaucuccagcgugcugaacgacauccucucccgccuggacccgcccgaggccgaggugcagaucgaccggcugaucaccgggcgccuccagagccugcagaccuacgugacccagcagcugauccgggcggccgagauccgcgccagcgccaaccucgccgcgaccaagauguccgagugcguccugggccagagcaagcggguggacuucugcggcaagggguaccaccugauguccuucccccagagcgccccgcacggcguggucuuccuccacgugacguacguccccgcccaggagaagaacuucaccaccgcccccgcgaucugccacgacgggaaggcccacuucccccgcgagggcguguucguguccaacgggacccacugguucgucacgcagcggaacuucuacgagccgcagaucaucaccaccgacaacaccuucgugagcggcaacugcgacguggucaucggcaucgugaacaacacgguguacgacccccugcagcccgagcuggacuccuucaaggaggagcucgacaaguacuucaagaaccacaccagccccgacgucgaccugggggacaucuccggcaucaacgccagcguggugaacauccagaaggagaucgaccgccugaacgaggucgccaagaaccucaacgagucccugaucgaccugcaggagcucgggaaguacgagcaguacaucaaguggccgugguacaucuggcugggcuucaucgccggccugaucgcgaucgugauggugaccaucaugcucugcugcaugaccagcugcugcuccugccugaaggggugcugcagcugcggcuccugcugcaaguucgacgaggacgacagcgagcccguccugaagggggugaagcuccacuacacgugaggacuagucccuguucccagagcccacuuuuuuuucuuuuuuugaaauaaaauagccugucuuucagaucucaaaggcucuuuucagagccaccaaaaaaaaaaaaaaaaaaaaaaaaaa

SEQ ID NO: 26926 - RNA, 4054 nt, Artificial Sequence
  SARS-CoV-2/Wuhan/WIV05/2019__EPI_ISL_402128 spike protein mRNA gc (1-1273)(K986P_V987P) R10301
aggagagucccgcagucggcguccagcggcucugcuuguucgugugugugucguugcaggccuuauucaagcuuaccauguucguguuccugguccuccugccccuggugagcucccagugcgugaaccucaccacccgcacgcagcugccgcccgccuacaccaacagcuucacccggggcgucuacuaccccgacaagguguuccgcuccagcgugcugcacuccacccaggaccucuuccugcccuucuucagcaacgucacgugguuccacgccauccacguguccgggaccaacggcaccaagcgguucgacaacccggugcugcccuucaacgacggggucuacuucgcgagcaccgagaaguccaacaucauccgcggcuggaucuucgggacgacccucgacagcaagacccagucccugcugaucgugaacaacgccaccaacguggucaucaaggugugcgaguuccaguucugcaacgaccccuuccucggcguguacuaccacaagaacaacaagagcuggauggaguccgaguuccgggucuacagcuccgccaacaacugcacguucgaguacgugagccagcccuuccugauggaccuggagggcaagcaggggaacuucaagaaccuccgcgaguucguguucaagaacaucgacggcuacuucaagaucuacuccaagcacaccccgaucaaccugguccgggaccugccccagggguucagcgcccucgagccccugguggaccugcccaucggcaucaacaucacccgcuuccagacccuccuggcccugcaccgguccuaccucacgccgggggacagcagcuccggcuggaccgcgggcgccgccgccuacuacgugggguaccugcagccccgcaccuuccugcucaaguacaacgagaacggcaccaucacggacgcggucgacugcgcccuggacccccugagcgagaccaagugcacccucaaguccuucaccguggagaaggggaucuaccagacgagcaacuuccgggugcagcccaccgaguccaucguccgcuucccgaacaucaccaaccugugccccuucggcgagguguucaacgccacccgguucgccagcgucuacgccuggaaccgcaagcggaucuccaacugcguggcggacuacagcgugcuguacaacuccgccagcuucuccacguucaagugcuacggcgucagccccaccaagcucaacgaccugugcuucaccaacguguacgccgacuccuucgugauccgcggggacgagguccggcagaucgcccccggccagaccgggaagaucgccgacuacaacuacaagcugccggacgacuucacgggcugcgugaucgcguggaacagcaacaaccucgacuccaaggucgggggcaacuacaacuaccuguaccgccuguuccgcaagagcaaccucaagcccuucgagcgggacaucuccaccgagaucuaccaggccggcagcacccccugcaacgggguggagggcuucaacugcuacuucccccugcaguccuacggguuccagccgaccaacggcgugggguaccagcccuaccggguggucgugcugagcuucgagcuccugcacgcccccgccacggugugcggccccaagaaguccaccaaccuggucaagaacaagugcgugaacuucaacuucaacggccucaccgggaccggcgugcugaccgagagcaacaagaaguuccugccguuccagcaguucgggcgcgacaucgccgacacgaccgacgcgguccgcgacccccagacccuggagauccucgacaucacccccugcagcuucggcgggguguccgugaucacgccgggcaccaacaccagcaaccaggucgccgugcuguaccaggacgugaacugcaccgagguccccguggccauccacgccgaccagcugacgcccaccuggcggguguacuccaccggcagcaacgucuuccagacccgcgccgggugccucaucggcgcggagcacgugaacaacuccuacgagugcgacauccccaucggggccggcaucugcgccagcuaccagacgcagaccaacuccccgcggcgcgcccggagcguggcgucccagagcaucaucgccuacaccaugucccugggcgccgagaacagcgucgccuacuccaacaacagcaucgccauccccaccaacuucacgaucuccgugaccaccgagauccugcccgugagcaugaccaagacgagcgucgacugcaccauguacaucugcggggacuccaccgagugcagcaaccuccugcugcaguacggcuccuucugcacccagcucaaccgcgcgcugacggggaucgccguggagcaggacaagaacacccaggagguguucgcccaggucaagcagaucuacaagacgcccccgaucaaggacuucggcggguucaacuucagccagauccugcccgaccccuccaagcccagcaagcgguccuucaucgaggaccuccuguucaacaaggugacccuggccgacgccggcuucaucaagcaguacggcgacugccucggggacaucgcggcccgcgaccugaucugcgcccagaaguucaacggccugaccgugcucccgccccugcugaccgacgagaugaucgcccaguacaccagcgcccuccuggcggggaccaucacguccggcuggaccuucggggccggcgccgcccugcagauccccuucgcgaugcagauggccuaccgguucaacggcaucggggucacccagaacgugcucuacgagaaccagaagcugaucgccaaccaguucaacagcgccaucggcaagauccaggacucccugagcuccaccgccagcgcgcucgggaagcugcaggacguggucaaccagaacgcccaggcccugaacacgcucgugaagcagcuguccagcaacuucggcgccaucuccagcgugcugaacgacauccucucccgccuggacccgcccgaggccgaggugcagaucgaccggcugaucaccgggcgccuccagagccugcagaccuacgugacccagcagcugauccgggcggccgagauccgcgccagcgccaaccucgccgcgaccaagauguccgagugcguccugggccagagcaagcggguggacuucugcggcaagggguaccaccugauguccuucccccagagcgccccgcacggcguggucuuccuccacgugacguacguccccgcccaggagaagaacuucaccaccgcccccgcgaucugccacgacgggaaggcccacuucccccgcgagggcguguucguguccaacgggacccacugguucgucacgcagcggaacuucuacgagccgcagaucaucaccaccgacaacaccuucgugagcggcaacugcgacguggucaucggcaucgugaacaacacgguguacgacccccugcagcccgagcuggacuccuucaaggaggagcucgacaaguacuucaagaaccacaccagccccgacgucgaccugggggacaucuccggcaucaacgccagcguggugaacauccagaaggagaucgaccgccugaacgaggucgccaagaaccucaacgagucccugaucgaccugcaggagcucgggaaguacgagcaguacaucaaguggccgugguacaucuggcugggcuucaucgccggccugaucgcgaucgugauggugaccaucaugcucugcugcaugaccagcugcugcuccugccugaaggggugcugcagcugcggcuccugcugcaaguucgacgaggacgacagcgagcccguccugaagggggugaagcuccacuacacgugaggacuagucccuguucccagagcccacuuuuuuuucuuuuuuugaaauaaaauagccugucuuucagaucucaaaggcucuuuucagagccaccaaaaaaaaaaaaaaaaaaaaaaaaaaaaaaaaaaaaaaaaaaaaaaaaaaaaaaaaaaaaa

SEQ ID NO: 26927 - RNA, 4074 nt, Artificial Sequence
  SARS-CoV-2/Wuhan/WIV05/2019__EPI_ISL_402128 spike protein mRNA gc (1-1273)(K986P_V987P) R10302
aggagagucccgcagucggcguccagcggcucugcuuguucgugugugugucguugcaggccuuauucaagcuuaccauguucguguuccugguccuccugccccuggugagcucccagugcgugaaccucaccacccgcacgcagcugccgcccgccuacaccaacagcuucacccggggcgucuacuaccccgacaagguguuccgcuccagcgugcugcacuccacccaggaccucuuccugcccuucuucagcaacgucacgugguuccacgccauccacguguccgggaccaacggcaccaagcgguucgacaacccggugcugcccuucaacgacggggucuacuucgcgagcaccgagaaguccaacaucauccgcggcuggaucuucgggacgacccucgacagcaagacccagucccugcugaucgugaacaacgccaccaacguggucaucaaggugugcgaguuccaguucugcaacgaccccuuccucggcguguacuaccacaagaacaacaagagcuggauggaguccgaguuccgggucuacagcuccgccaacaacugcacguucgaguacgugagccagcccuuccugauggaccuggagggcaagcaggggaacuucaagaaccuccgcgaguucguguucaagaacaucgacggcuacuucaagaucuacuccaagcacaccccgaucaaccugguccgggaccugccccagggguucagcgcccucgagccccugguggaccugcccaucggcaucaacaucacccgcuuccagacccuccuggcccugcaccgguccuaccucacgccgggggacagcagcuccggcuggaccgcgggcgccgccgccuacuacgugggguaccugcagccccgcaccuuccugcucaaguacaacgagaacggcaccaucacggacgcggucgacugcgcccuggacccccugagcgagaccaagugcacccucaaguccuucaccguggagaaggggaucuaccagacgagcaacuuccgggugcagcccaccgaguccaucguccgcuucccgaacaucaccaaccugugccccuucggcgagguguucaacgccacccgguucgccagcgucuacgccuggaaccgcaagcggaucuccaacugcguggcggacuacagcgugcuguacaacuccgccagcuucuccacguucaagugcuacggcgucagccccaccaagcucaacgaccugugcuucaccaacguguacgccgacuccuucgugauccgcggggacgagguccggcagaucgcccccggccagaccgggaagaucgccgacuacaacuacaagcugccggacgacuucacgggcugcgugaucgcguggaacagcaacaaccucgacuccaaggucgggggcaacuacaacuaccuguaccgccuguuccgcaagagcaaccucaagcccuucgagcgggacaucuccaccgagaucuaccaggccggcagcacccccugcaacgggguggagggcuucaacugcuacuucccccugcaguccuacggguuccagccgaccaacggcgugggguaccagcccuaccggguggucgugcugagcuucgagcuccugcacgcccccgccacggugugcggccccaagaaguccaccaaccuggucaagaacaagugcgugaacuucaacuucaacggccucaccgggaccggcgugcugaccgagagcaacaagaaguuccugccguuccagcaguucgggcgcgacaucgccgacacgaccgacgcgguccgcgacccccagacccuggagauccucgacaucacccccugcagcuucggcgggguguccgugaucacgccgggcaccaacaccagcaaccaggucgccgugcuguaccaggacgugaacugcaccgagguccccguggccauccacgccgaccagcugacgcccaccuggcggguguacuccaccggcagcaacgucuuccagacccgcgccgggugccucaucggcgcggagcacgugaacaacuccuacgagugcgacauccccaucggggccggcaucugcgccagcuaccagacgcagaccaacuccccgcggcgcgcccggagcguggcgucccagagcaucaucgccuacaccaugucccugggcgccgagaacagcgucgccuacuccaacaacagcaucgccauccccaccaacuucacgaucuccgugaccaccgagauccugcccgugagcaugaccaagacgagcgucgacugcaccauguacaucugcggggacuccaccgagugcagcaaccuccugcugcaguacggcuccuucugcacccagcucaaccgcgcgcugacggggaucgccguggagcaggacaagaacacccaggagguguucgcccaggucaagcagaucuacaagacgcccccgaucaaggacuucggcggguucaacuucagccagauccugcccgaccccuccaagcccagcaagcgguccuucaucgaggaccuccuguucaacaaggugacccuggccgacgccggcuucaucaagcaguacggcgacugccucggggacaucgcggcccgcgaccugaucugcgcccagaaguucaacggccugaccgugcucccgccccugcugaccgacgagaugaucgcccaguacaccagcgcccuccuggcggggaccaucacguccggcuggaccuucggggccggcgccgcccugcagauccccuucgcgaugcagauggccuaccgguucaacggcaucggggucacccagaacgugcucuacgagaaccagaagcugaucgccaaccaguucaacagcgccaucggcaagauccaggacucccugagcuccaccgccagcgcgcucgggaagcugcaggacguggucaaccagaacgcccaggcccugaacacgcucgugaagcagcuguccagcaacuucggcgccaucuccagcgugcugaacgacauccucucccgccuggacccgcccgaggccgaggugcagaucgaccggcugaucaccgggcgccuccagagccugcagaccuacgugacccagcagcugauccgggcggccgagauccgcgccagcgccaaccucgccgcgaccaagauguccgagugcguccugggccagagcaagcggguggacuucugcggcaagggguaccaccugauguccuucccccagagcgccccgcacggcguggucuuccuccacgugacguacguccccgcccaggagaagaacuucaccaccgcccccgcgaucugccacgacgggaaggcccacuucccccgcgagggcguguucguguccaacgggacccacugguucgucacgcagcggaacuucuacgagccgcagaucaucaccaccgacaacaccuucgugagcggcaacugcgacguggucaucggcaucgugaacaacacgguguacgacccccugcagcccgagcuggacuccuucaaggaggagcucgacaaguacuucaagaaccacaccagccccgacgucgaccugggggacaucuccggcaucaacgccagcguggugaacauccagaaggagaucgaccgccugaacgaggucgccaagaaccucaacgagucccugaucgaccugcaggagcucgggaaguacgagcaguacaucaaguggccgugguacaucuggcugggcuucaucgccggccugaucgcgaucgugauggugaccaucaugcucugcugcaugaccagcugcugcuccugccugaaggggugcugcagcugcggcuccugcugcaaguucgacgaggacgacagcgagcccguccugaagggggugaagcuccacuacacgugaggacuagucccuguucccagagcccacuuuuuuuucuuuuuuugaaauaaaauagccugucuuucagaucucaaaggcucuuuucagagccaccaaaaaaaaaaaaaaaaaaaaaaaaaaaaaaaaaaaaaaaaaaaaaaaaaaaaaaaaaaaaaaaaaaaaaaaaaaaaaaaaa

SEQ ID NO: 26928 - RNA, 4084 nt, Artificial Sequence
  SARS-CoV-2/Wuhan/WIV05/2019__EPI_ISL_402128 spike protein mRNA gc (1-1273)(K986P_V987P) R10303
aggagagucccgcagucggcguccagcggcucugcuuguucgugugugugucguugcaggccuuauucaagcuuaccauguucguguuccugguccuccugccccuggugagcucccagugcgugaaccucaccacccgcacgcagcugccgcccgccuacaccaacagcuucacccggggcgucuacuaccccgacaagguguuccgcuccagcgugcugcacuccacccaggaccucuuccugcccuucuucagcaacgucacgugguuccacgccauccacguguccgggaccaacggcaccaagcgguucgacaacccggugcugcccuucaacgacggggucuacuucgcgagcaccgagaaguccaacaucauccgcggcuggaucuucgggacgacccucgacagcaagacccagucccugcugaucgugaacaacgccaccaacguggucaucaaggugugcgaguuccaguucugcaacgaccccuuccucggcguguacuaccacaagaacaacaagagcuggauggaguccgaguuccgggucuacagcuccgccaacaacugcacguucgaguacgugagccagcccuuccugauggaccuggagggcaagcaggggaacuucaagaaccuccgcgaguucguguucaagaacaucgacggcuacuucaagaucuacuccaagcacaccccgaucaaccugguccgggaccugccccagggguucagcgcccucgagccccugguggaccugcccaucggcaucaacaucacccgcuuccagacccuccuggcccugcaccgguccuaccucacgccgggggacagcagcuccggcuggaccgcgggcgccgccgccuacuacgugggguaccugcagccccgcaccuuccugcucaaguacaacgagaacggcaccaucacggacgcggucgacugcgcccuggacccccugagcgagaccaagugcacccucaaguccuucaccguggagaaggggaucuaccagacgagcaacuuccgggugcagcccaccgaguccaucguccgcuucccgaacaucaccaaccugugccccuucggcgagguguucaacgccacccgguucgccagcgucuacgccuggaaccgcaagcggaucuccaacugcguggcggacuacagcgugcuguacaacuccgccagcuucuccacguucaagugcuacggcgucagccccaccaagcucaacgaccugugcuucaccaacguguacgccgacuccuucgugauccgcggggacgagguccggcagaucgcccccggccagaccgggaagaucgccgacuacaacuacaagcugccggacgacuucacgggcugcgugaucgcguggaacagcaacaaccucgacuccaaggucgggggcaacuacaacuaccuguaccgccuguuccgcaagagcaaccucaagcccuucgagcgggacaucuccaccgagaucuaccaggccggcagcacccccugcaacgggguggagggcuucaacugcuacuucccccugcaguccuacggguuccagccgaccaacggcgugggguaccagcccuaccggguggucgugcugagcuucgagcuccugcacgcccccgccacggugugcggccccaagaaguccaccaaccuggucaagaacaagugcgugaacuucaacuucaacggccucaccgggaccggcgugcugaccgagagcaacaagaaguuccugccguuccagcaguucgggcgcgacaucgccgacacgaccgacgcgguccgcgacccccagacccuggagauccucgacaucacccccugcagcuucggcgggguguccgugaucacgccgggcaccaacaccagcaaccaggucgccgugcuguaccaggacgugaacugcaccgagguccccguggccauccacgccgaccagcugacgcccaccuggcggguguacuccaccggcagcaacgucuuccagacccgcgccgggugccucaucggcgcggagcacgugaacaacuccuacgagugcgacauccccaucggggccggcaucugcgccagcuaccagacgcagaccaacuccccgcggcgcgcccggagcguggcgucccagagcaucaucgccuacaccaugucccugggcgccgagaacagcgucgccuacuccaacaacagcaucgccauccccaccaacuucacgaucuccgugaccaccgagauccugcccgugagcaugaccaagacgagcgucgacugcaccauguacaucugcggggacuccaccgagugcagcaaccuccugcugcaguacggcuccuucugcacccagcucaaccgcgcgcugacggggaucgccguggagcaggacaagaacacccaggagguguucgcccaggucaagcagaucuacaagacgcccccgaucaaggacuucggcggguucaacuucagccagauccugcccgaccccuccaagcccagcaagcgguccuucaucgaggaccuccuguucaacaaggugacccuggccgacgccggcuucaucaagcaguacggcgacugccucggggacaucgcggcccgcgaccugaucugcgcccagaaguucaacggccugaccgugcucccgccccugcugaccgacgagaugaucgcccaguacaccagcgcccuccuggcggggaccaucacguccggcuggaccuucggggccggcgccgcccugcagauccccuucgcgaugcagauggccuaccgguucaacggcaucggggucacccagaacgugcucuacgagaaccagaagcugaucgccaaccaguucaacagcgccaucggcaagauccaggacucccugagcuccaccgccagcgcgcucgggaagcugcaggacguggucaaccagaacgcccaggcccugaacacgcucgugaagcagcuguccagcaacuucggcgccaucuccagcgugcugaacgacauccucucccgccuggacccgcccgaggccgaggugcagaucgaccggcugaucaccgggcgccuccagagccugcagaccuacgugacccagcagcugauccgggcggccgagauccgcgccagcgccaaccucgccgcgaccaagauguccgagugcguccugggccagagcaagcggguggacuucugcggcaagggguaccaccugauguccuucccccagagcgccccgcacggcguggucuuccuccacgugacguacguccccgcccaggagaagaacuucaccaccgcccccgcgaucugccacgacgggaaggcccacuucccccgcgagggcguguucguguccaacgggacccacugguucgucacgcagcggaacuucuacgagccgcagaucaucaccaccgacaacaccuucgugagcggcaacugcgacguggucaucggcaucgugaacaacacgguguacgacccccugcagcccgagcuggacuccuucaaggaggagcucgacaaguacuucaagaaccacaccagccccgacgucgaccugggggacaucuccggcaucaacgccagcguggugaacauccagaaggagaucgaccgccugaacgaggucgccaagaaccucaacgagucccugaucgaccugcaggagcucgggaaguacgagcaguacaucaaguggccgugguacaucuggcugggcuucaucgccggccugaucgcgaucgugauggugaccaucaugcucugcugcaugaccagcugcugcuccugccugaaggggugcugcagcugcggcuccugcugcaaguucgacgaggacgacagcgagcccguccugaagggggugaagcuccacuacacgugaggacuagucccuguucccagagcccacuuuuuuuucuuuuuuugaaauaaaauagccugucuuucagaucucaaaggcucuuuucagagccaccaaaaaaaaaaaaaaaaaaaaaaaaaaaaaaaaaaaaaaaaaaaaaaaaaaaaaaaaaaaaaaaaaaaaaaaaaaaaaaaaaaaaaaaaaaa

SEQ ID NO: 26929 - RNA, 4104 nt, Artificial Sequence
  SARS-CoV-2/Wuhan/WIV05/2019__EPI_ISL_402128 spike protein mRNA gc (1-1273)(K986P_V987P) R10304
aggagagucccgcagucggcguccagcggcucugcuuguucgugugugugucguugcaggccuuauucaagcuuaccauguucguguuccugguccuccugccccuggugagcucccagugcgugaaccucaccacccgcacgcagcugccgcccgccuacaccaacagcuucacccggggcgucuacuaccccgacaagguguuccgcuccagcgugcugcacuccacccaggaccucuuccugcccuucuucagcaacgucacgugguuccacgccauccacguguccgggaccaacggcaccaagcgguucgacaacccggugcugcccuucaacgacggggucuacuucgcgagcaccgagaaguccaacaucauccgcggcuggaucuucgggacgacccucgacagcaagacccagucccugcugaucgugaacaacgccaccaacguggucaucaaggugugcgaguuccaguucugcaacgaccccuuccucggcguguacuaccacaagaacaacaagagcuggauggaguccgaguuccgggucuacagcuccgccaacaacugcacguucgaguacgugagccagcccuuccugauggaccuggagggcaagcaggggaacuucaagaaccuccgcgaguucguguucaagaacaucgacggcuacuucaagaucuacuccaagcacaccccgaucaaccugguccgggaccugccccagggguucagcgcccucgagccccugguggaccugcccaucggcaucaacaucacccgcuuccagacccuccuggcccugcaccgguccuaccucacgccgggggacagcagcuccggcuggaccgcgggcgccgccgccuacuacgugggguaccugcagccccgcaccuuccugcucaaguacaacgagaacggcaccaucacggacgcggucgacugcgcccuggacccccugagcgagaccaagugcacccucaaguccuucaccguggagaaggggaucuaccagacgagcaacuuccgggugcagcccaccgaguccaucguccgcuucccgaacaucaccaaccugugccccuucggcgagguguucaacgccacccgguucgccagcgucuacgccuggaaccgcaagcggaucuccaacugcguggcggacuacagcgugcuguacaacuccgccagcuucuccacguucaagugcuacggcgucagccccaccaagcucaacgaccugugcuucaccaacguguacgccgacuccuucgugauccgcggggacgagguccggcagaucgcccccggccagaccgggaagaucgccgacuacaacuacaagcugccggacgacuucacgggcugcgugaucgcguggaacagcaacaaccucgacuccaaggucgggggcaacuacaacuaccuguaccgccuguuccgcaagagcaaccucaagcccuucgagcgggacaucuccaccgagaucuaccaggccggcagcacccccugcaacgggguggagggcuucaacugcuacuucccccugcaguccuacggguuccagccgaccaacggcgugggguaccagcccuaccggguggucgugcugagcuucgagcuccugcacgcccccgccacggugugcggccccaagaaguccaccaaccuggucaagaacaagugcgugaacuucaacuucaacggccucaccgggaccggcgugcugaccgagagcaacaagaaguuccugccguuccagcaguucgggcgcgacaucgccgacacgaccgacgcgguccgcgacccccagacccuggagauccucgacaucacccccugcagcuucggcgggguguccgugaucacgccgggcaccaacaccagcaaccaggucgccgugcuguaccaggacgugaacugcaccgagguccccguggccauccacgccgaccagcugacgcccaccuggcggguguacuccaccggcagcaacgucuuccagacccgcgccgggugccucaucggcgcggagcacgugaacaacuccuacgagugcgacauccccaucggggccggcaucugcgccagcuaccagacgcagaccaacuccccgcggcgcgcccggagcguggcgucccagagcaucaucgccuacaccaugucccugggcgccgagaacagcgucgccuacuccaacaacagcaucgccauccccaccaacuucacgaucuccgugaccaccgagauccugcccgugagcaugaccaagacgagcgucgacugcaccauguacaucugcggggacuccaccgagugcagcaaccuccugcugcaguacggcuccuucugcacccagcucaaccgcgcgcugacggggaucgccguggagcaggacaagaacacccaggagguguucgcccaggucaagcagaucuacaagacgcccccgaucaaggacuucggcggguucaacuucagccagauccugcccgaccccuccaagcccagcaagcgguccuucaucgaggaccuccuguucaacaaggugacccuggccgacgccggcuucaucaagcaguacggcgacugccucggggacaucgcggcccgcgaccugaucugcgcccagaaguucaacggccugaccgugcucccgccccugcugaccgacgagaugaucgcccaguacaccagcgcccuccuggcggggaccaucacguccggcuggaccuucggggccggcgccgcccugcagauccccuucgcgaugcagauggccuaccgguucaacggcaucggggucacccagaacgugcucuacgagaaccagaagcugaucgccaaccaguucaacagcgccaucggcaagauccaggacucccugagcuccaccgccagcgcgcucgggaagcugcaggacguggucaaccagaacgcccaggcccugaacacgcucgugaagcagcuguccagcaacuucggcgccaucuccagcgugcugaacgacauccucucccgccuggacccgcccgaggccgaggugcagaucgaccggcugaucaccgggcgccuccagagccugcagaccuacgugacccagcagcugauccgggcggccgagauccgcgccagcgccaaccucgccgcgaccaagauguccgagugcguccugggccagagcaagcggguggacuucugcggcaagggguaccaccugauguccuucccccagagcgccccgcacggcguggucuuccuccacgugacguacguccccgcccaggagaagaacuucaccaccgcccccgcgaucugccacgacgggaaggcccacuucccccgcgagggcguguucguguccaacgggacccacugguucgucacgcagcggaacuucuacgagccgcagaucaucaccaccgacaacaccuucgugagcggcaacugcgacguggucaucggcaucgugaacaacacgguguacgacccccugcagcccgagcuggacuccuucaaggaggagcucgacaaguacuucaagaaccacaccagccccgacgucgaccugggggacaucuccggcaucaacgccagcguggugaacauccagaaggagaucgaccgccugaacgaggucgccaagaaccucaacgagucccugaucgaccugcaggagcucgggaaguacgagcaguacaucaaguggccgugguacaucuggcugggcuucaucgccggccugaucgcgaucgugauggugaccaucaugcucugcugcaugaccagcugcugcuccugccugaaggggugcugcagcugcggcuccugcugcaaguucgacgaggacgacagcgagcccguccugaagggggugaagcuccacuacacgugaggacuagucccuguucccagagcccacuuuuuuuucuuuuuuugaaauaaaauagccugucuuucagaucucaaaggcucuuuucagagccaccaaaaaaaaaaaaaaaaaaaaaaaaaaaaaaaaaaaaaaaaaaaaaaaaaaaaaaaaaaaaaaaaaaaaaaaaaaaaaaaaaaaaaaaaaaaaaaaaaaaaaaaaaaaaaaa

SEQ ID NO: 26930 - RNA, 4114 nt, Artificial Sequence
  SARS-CoV-2/Wuhan/WIV05/2019__EPI_ISL_402128 spike protein mRNA gc (1-1273)(K986P_V987P) R10305
aggagagucccgcagucggcguccagcggcucugcuuguucgugugugugucguugcaggccuuauucaagcuuaccauguucguguuccugguccuccugccccuggugagcucccagugcgugaaccucaccacccgcacgcagcugccgcccgccuacaccaacagcuucacccggggcgucuacuaccccgacaagguguuccgcuccagcgugcugcacuccacccaggaccucuuccugcccuucuucagcaacgucacgugguuccacgccauccacguguccgggaccaacggcaccaagcgguucgacaacccggugcugcccuucaacgacggggucuacuucgcgagcaccgagaaguccaacaucauccgcggcuggaucuucgggacgacccucgacagcaagacccagucccugcugaucgugaacaacgccaccaacguggucaucaaggugugcgaguuccaguucugcaacgaccccuuccucggcguguacuaccacaagaacaacaagagcuggauggaguccgaguuccgggucuacagcuccgccaacaacugcacguucgaguacgugagccagcccuuccugauggaccuggagggcaagcaggggaacuucaagaaccuccgcgaguucguguucaagaacaucgacggcuacuucaagaucuacuccaagcacaccccgaucaaccugguccgggaccugccccagggguucagcgcccucgagccccugguggaccugcccaucggcaucaacaucacccgcuuccagacccuccuggcccugcaccgguccuaccucacgccgggggacagcagcuccggcuggaccgcgggcgccgccgccuacuacgugggguaccugcagccccgcaccuuccugcucaaguacaacgagaacggcaccaucacggacgcggucgacugcgcccuggacccccugagcgagaccaagugcacccucaaguccuucaccguggagaaggggaucuaccagacgagcaacuuccgggugcagcccaccgaguccaucguccgcuucccgaacaucaccaaccugugccccuucggcgagguguucaacgccacccgguucgccagcgucuacgccuggaaccgcaagcggaucuccaacugcguggcggacuacagcgugcuguacaacuccgccagcuucuccacguucaagugcuacggcgucagccccaccaagcucaacgaccugugcuucaccaacguguacgccgacuccuucgugauccgcggggacgagguccggcagaucgcccccggccagaccgggaagaucgccgacuacaacuacaagcugccggacgacuucacgggcugcgugaucgcguggaacagcaacaaccucgacuccaaggucgggggcaacuacaacuaccuguaccgccuguuccgcaagagcaaccucaagcccuucgagcgggacaucuccaccgagaucuaccaggccggcagcacccccugcaacgggguggagggcuucaacugcuacuucccccugcaguccuacggguuccagccgaccaacggcgugggguaccagcccuaccggguggucgugcugagcuucgagcuccugcacgcccccgccacggugugcggccccaagaaguccaccaaccuggucaagaacaagugcgugaacuucaacuucaacggccucaccgggaccggcgugcugaccgagagcaacaagaaguuccugccguuccagcaguucgggcgcgacaucgccgacacgaccgacgcgguccgcgacccccagacccuggagauccucgacaucacccccugcagcuucggcgggguguccgugaucacgccgggcaccaacaccagcaaccaggucgccgugcuguaccaggacgugaacugcaccgagguccccguggccauccacgccgaccagcugacgcccaccuggcggguguacuccaccggcagcaacgucuuccagacccgcgccgggugccucaucggcgcggagcacgugaacaacuccuacgagugcgacauccccaucggggccggcaucugcgccagcuaccagacgcagaccaacuccccgcggcgcgcccggagcguggcgucccagagcaucaucgccuacaccaugucccugggcgccgagaacagcgucgccuacuccaacaacagcaucgccauccccaccaacuucacgaucuccgugaccaccgagauccugcccgugagcaugaccaagacgagcgucgacugcaccauguacaucugcggggacuccaccgagugcagcaaccuccugcugcaguacggcuccuucugcacccagcucaaccgcgcgcugacggggaucgccguggagcaggacaagaacacccaggagguguucgcccaggucaagcagaucuacaagacgcccccgaucaaggacuucggcggguucaacuucagccagauccugcccgaccccuccaagcccagcaagcgguccuucaucgaggaccuccuguucaacaaggugacccuggccgacgccggcuucaucaagcaguacggcgacugccucggggacaucgcggcccgcgaccugaucugcgcccagaaguucaacggccugaccgugcucccgccccugcugaccgacgagaugaucgcccaguacaccagcgcccuccuggcggggaccaucacguccggcuggaccuucggggccggcgccgcccugcagauccccuucgcgaugcagauggccuaccgguucaacggcaucggggucacccagaacgugcucuacgagaaccagaagcugaucgccaaccaguucaacagcgccaucggcaagauccaggacucccugagcuccaccgccagcgcgcucgggaagcugcaggacguggucaaccagaacgcccaggcccugaacacgcucgugaagcagcuguccagcaacuucggcgccaucuccagcgugcugaacgacauccucucccgccuggacccgcccgaggccgaggugcagaucgaccggcugaucaccgggcgccuccagagccugcagaccuacgugacccagcagcugauccgggcggccgagauccgcgccagcgccaaccucgccgcgaccaagauguccgagugcguccugggccagagcaagcggguggacuucugcggcaagggguaccaccugauguccuucccccagagcgccccgcacggcguggucuuccuccacgugacguacguccccgcccaggagaagaacuucaccaccgcccccgcgaucugccacgacgggaaggcccacuucccccgcgagggcguguucguguccaacgggacccacugguucgucacgcagcggaacuucuacgagccgcagaucaucaccaccgacaacaccuucgugagcggcaacugcgacguggucaucggcaucgugaacaacacgguguacgacccccugcagcccgagcuggacuccuucaaggaggagcucgacaaguacuucaagaaccacaccagccccgacgucgaccugggggacaucuccggcaucaacgccagcguggugaacauccagaaggagaucgaccgccugaacgaggucgccaagaaccucaacgagucccugaucgaccugcaggagcucgggaaguacgagcaguacaucaaguggccgugguacaucuggcugggcuucaucgccggccugaucgcgaucgugauggugaccaucaugcucugcugcaugaccagcugcugcuccugccugaaggggugcugcagcugcggcuccugcugcaaguucgacgaggacgacagcgagcccguccugaagggggugaagcuccacuacacgugaggacuagucccuguucccagagcccacuuuuuuuucuuuuuuugaaauaaaauagccugucuuucagaucucaaaggcucuuuucagagccaccaaaaaaaaaaaaaaaaaaaaaaaaaaaaaaaaaaaaaaaaaaaaaaaaaaaaaaaaaaaaaaaaaaaaaaaaaaaaaaaaaaaaaaaaaaaaaaaaaaaaaaaaaaaaaaaaaaaaaaaaa

SEQ ID NO: 26931 - RNA, 4134 nt, Artificial Sequence
  SARS-CoV-2/Wuhan/WIV05/2019__EPI_ISL_402128 spike protein mRNA gc (1-1273)(K986P_V987P) R10306
aggagagucccgcagucggcguccagcggcucugcuuguucgugugugugucguugcaggccuuauucaagcuuaccauguucguguuccugguccuccugccccuggugagcucccagugcgugaaccucaccacccgcacgcagcugccgcccgccuacaccaacagcuucacccggggcgucuacuaccccgacaagguguuccgcuccagcgugcugcacuccacccaggaccucuuccugcccuucuucagcaacgucacgugguuccacgccauccacguguccgggaccaacggcaccaagcgguucgacaacccggugcugcccuucaacgacggggucuacuucgcgagcaccgagaaguccaacaucauccgcggcuggaucuucgggacgacccucgacagcaagacccagucccugcugaucgugaacaacgccaccaacguggucaucaaggugugcgaguuccaguucugcaacgaccccuuccucggcguguacuaccacaagaacaacaagagcuggauggaguccgaguuccgggucuacagcuccgccaacaacugcacguucgaguacgugagccagcccuuccugauggaccuggagggcaagcaggggaacuucaagaaccuccgcgaguucguguucaagaacaucgacggcuacuucaagaucuacuccaagcacaccccgaucaaccugguccgggaccugccccagggguucagcgcccucgagccccugguggaccugcccaucggcaucaacaucacccgcuuccagacccuccuggcccugcaccgguccuaccucacgccgggggacagcagcuccggcuggaccgcgggcgccgccgccuacuacgugggguaccugcagccccgcaccuuccugcucaaguacaacgagaacggcaccaucacggacgcggucgacugcgcccuggacccccugagcgagaccaagugcacccucaaguccuucaccguggagaaggggaucuaccagacgagcaacuuccgggugcagcccaccgaguccaucguccgcuucccgaacaucaccaaccugugccccuucggcgagguguucaacgccacccgguucgccagcgucuacgccuggaaccgcaagcggaucuccaacugcguggcggacuacagcgugcuguacaacuccgccagcuucuccacguucaagugcuacggcgucagccccaccaagcucaacgaccugugcuucaccaacguguacgccgacuccuucgugauccgcggggacgagguccggcagaucgcccccggccagaccgggaagaucgccgacuacaacuacaagcugccggacgacuucacgggcugcgugaucgcguggaacagcaacaaccucgacuccaaggucgggggcaacuacaacuaccuguaccgccuguuccgcaagagcaaccucaagcccuucgagcgggacaucuccaccgagaucuaccaggccggcagcacccccugcaacgggguggagggcuucaacugcuacuucccccugcaguccuacggguuccagccgaccaacggcgugggguaccagcccuaccggguggucgugcugagcuucgagcuccugcacgcccccgccacggugugcggccccaagaaguccaccaaccuggucaagaacaagugcgugaacuucaacuucaacggccucaccgggaccggcgugcugaccgagagcaacaagaaguuccugccguuccagcaguucgggcgcgacaucgccgacacgaccgacgcgguccgcgacccccagacccuggagauccucgacaucacccccugcagcuucggcgggguguccgugaucacgccgggcaccaacaccagcaaccaggucgccgugcuguaccaggacgugaacugcaccgagguccccguggccauccacgccgaccagcugacgcccaccuggcggguguacuccaccggcagcaacgucuuccagacccgcgccgggugccucaucggcgcggagcacgugaacaacuccuacgagugcgacauccccaucggggccggcaucugcgccagcuaccagacgcagaccaacuccccgcggcgcgcccggagcguggcgucccagagcaucaucgccuacaccaugucccugggcgccgagaacagcgucgccuacuccaacaacagcaucgccauccccaccaacuucacgaucuccgugaccaccgagauccugcccgugagcaugaccaagacgagcgucgacugcaccauguacaucugcggggacuccaccgagugcagcaaccuccugcugcaguacggcuccuucugcacccagcucaaccgcgcgcugacggggaucgccguggagcaggacaagaacacccaggagguguucgcccaggucaagcagaucuacaagacgcccccgaucaaggacuucggcggguucaacuucagccagauccugcccgaccccuccaagcccagcaagcgguccuucaucgaggaccuccuguucaacaaggugacccuggccgacgccggcuucaucaagcaguacggcgacugccucggggacaucgcggcccgcgaccugaucugcgcccagaaguucaacggccugaccgugcucccgccccugcugaccgacgagaugaucgcccaguacaccagcgcccuccuggcggggaccaucacguccggcuggaccuucggggccggcgccgcccugcagauccccuucgcgaugcagauggccuaccgguucaacggcaucggggucacccagaacgugcucuacgagaaccagaagcugaucgccaaccaguucaacagcgccaucggcaagauccaggacucccugagcuccaccgccagcgcgcucgggaagcugcaggacguggucaaccagaacgcccaggcccugaacacgcucgugaagcagcuguccagcaacuucggcgccaucuccagcgugcugaacgacauccucucccgccuggacccgcccgaggccgaggugcagaucgaccggcugaucaccgggcgccuccagagccugcagaccuacgugacccagcagcugauccgggcggccgagauccgcgccagcgccaaccucgccgcgaccaagauguccgagugcguccugggccagagcaagcggguggacuucugcggcaagggguaccaccugauguccuucccccagagcgccccgcacggcguggucuuccuccacgugacguacguccccgcccaggagaagaacuucaccaccgcccccgcgaucugccacgacgggaaggcccacuucccccgcgagggcguguucguguccaacgggacccacugguucgucacgcagcggaacuucuacgagccgcagaucaucaccaccgacaacaccuucgugagcggcaacugcgacguggucaucggcaucgugaacaacacgguguacgacccccugcagcccgagcuggacuccuucaaggaggagcucgacaaguacuucaagaaccacaccagccccgacgucgaccugggggacaucuccggcaucaacgccagcguggugaacauccagaaggagaucgaccgccugaacgaggucgccaagaaccucaacgagucccugaucgaccugcaggagcucgggaaguacgagcaguacaucaaguggccgugguacaucuggcugggcuucaucgccggccugaucgcgaucgugauggugaccaucaugcucugcugcaugaccagcugcugcuccugccugaaggggugcugcagcugcggcuccugcugcaaguucgacgaggacgacagcgagcccguccugaagggggugaagcuccacuacacgugaggacuagucccuguucccagagcccacuuuuuuuucuuuuuuugaaauaaaauagccugucuuucagaucucaaaggcucuuuucagagccaccaaaaaaaaaaaaaaaaaaaaaaaaaaaaaaaaaaaaaaaaaaaaaaaaaaaaaaaaaaaaaaaaaaaaaaaaaaaaaaaaaaaaaaaaaaaaaaaaaaaaaaaaaaaaaaaaaaaaaaaaaaaaaaaaaaaaaaaaaaaaa

SEQ ID NO: 26932 - RNA, 3994 nt, Artificial Sequence
  SARS-CoV-2/Wuhan/WIV05/2019__EPI_ISL_402128 spike protein mRNA gc (1-1273)(K986P_V987P) R10307
aggagagucccgcagucggcguccagcggcucugcuuguucgugugugugucguugcaggccuuauucaagcuuaccauguucguguuccugguccuccugccccuggugagcucccagugcgugaaccucaccacccgcacgcagcugccgcccgccuacaccaacagcuucacccggggcgucuacuaccccgacaagguguuccgcuccagcgugcugcacuccacccaggaccucuuccugcccuucuucagcaacgucacgugguuccacgccauccacguguccgggaccaacggcaccaagcgguucgacaacccggugcugcccuucaacgacggggucuacuucgcgagcaccgagaaguccaacaucauccgcggcuggaucuucgggacgacccucgacagcaagacccagucccugcugaucgugaacaacgccaccaacguggucaucaaggugugcgaguuccaguucugcaacgaccccuuccucggcguguacuaccacaagaacaacaagagcuggauggaguccgaguuccgggucuacagcuccgccaacaacugcacguucgaguacgugagccagcccuuccugauggaccuggagggcaagcaggggaacuucaagaaccuccgcgaguucguguucaagaacaucgacggcuacuucaagaucuacuccaagcacaccccgaucaaccugguccgggaccugccccagggguucagcgcccucgagccccugguggaccugcccaucggcaucaacaucacccgcuuccagacccuccuggcccugcaccgguccuaccucacgccgggggacagcagcuccggcuggaccgcgggcgccgccgccuacuacgugggguaccugcagccccgcaccuuccugcucaaguacaacgagaacggcaccaucacggacgcggucgacugcgcccuggacccccugagcgagaccaagugcacccucaaguccuucaccguggagaaggggaucuaccagacgagcaacuuccgggugcagcccaccgaguccaucguccgcuucccgaacaucaccaaccugugccccuucggcgagguguucaacgccacccgguucgccagcgucuacgccuggaaccgcaagcggaucuccaacugcguggcggacuacagcgugcuguacaacuccgccagcuucuccacguucaagugcuacggcgucagccccaccaagcucaacgaccugugcuucaccaacguguacgccgacuccuucgugauccgcggggacgagguccggcagaucgcccccggccagaccgggaagaucgccgacuacaacuacaagcugccggacgacuucacgggcugcgugaucgcguggaacagcaacaaccucgacuccaaggucgggggcaacuacaacuaccuguaccgccuguuccgcaagagcaaccucaagcccuucgagcgggacaucuccaccgagaucuaccaggccggcagcacccccugcaacgggguggagggcuucaacugcuacuucccccugcaguccuacggguuccagccgaccaacggcgugggguaccagcccuaccggguggucgugcugagcuucgagcuccugcacgcccccgccacggugugcggccccaagaaguccaccaaccuggucaagaacaagugcgugaacuucaacuucaacggccucaccgggaccggcgugcugaccgagagcaacaagaaguuccugccguuccagcaguucgggcgcgacaucgccgacacgaccgacgcgguccgcgacccccagacccuggagauccucgacaucacccccugcagcuucggcgggguguccgugaucacgccgggcaccaacaccagcaaccaggucgccgugcuguaccaggacgugaacugcaccgagguccccguggccauccacgccgaccagcugacgcccaccuggcggguguacuccaccggcagcaacgucuuccagacccgcgccgggugccucaucggcgcggagcacgugaacaacuccuacgagugcgacauccccaucggggccggcaucugcgccagcuaccagacgcagaccaacuccccgcggcgcgcccggagcguggcgucccagagcaucaucgccuacaccaugucccugggcgccgagaacagcgucgccuacuccaacaacagcaucgccauccccaccaacuucacgaucuccgugaccaccgagauccugcccgugagcaugaccaagacgagcgucgacugcaccauguacaucugcggggacuccaccgagugcagcaaccuccugcugcaguacggcuccuucugcacccagcucaaccgcgcgcugacggggaucgccguggagcaggacaagaacacccaggagguguucgcccaggucaagcagaucuacaagacgcccccgaucaaggacuucggcggguucaacuucagccagauccugcccgaccccuccaagcccagcaagcgguccuucaucgaggaccuccuguucaacaaggugacccuggccgacgccggcuucaucaagcaguacggcgacugccucggggacaucgcggcccgcgaccugaucugcgcccagaaguucaacggccugaccgugcucccgccccugcugaccgacgagaugaucgcccaguacaccagcgcccuccuggcggggaccaucacguccggcuggaccuucggggccggcgccgcccugcagauccccuucgcgaugcagauggccuaccgguucaacggcaucggggucacccagaacgugcucuacgagaaccagaagcugaucgccaaccaguucaacagcgccaucggcaagauccaggacucccugagcuccaccgccagcgcgcucgggaagcugcaggacguggucaaccagaacgcccaggcccugaacacgcucgugaagcagcuguccagcaacuucggcgccaucuccagcgugcugaacgacauccucucccgccuggacccgcccgaggccgaggugcagaucgaccggcugaucaccgggcgccuccagagccugcagaccuacgugacccagcagcugauccgggcggccgagauccgcgccagcgccaaccucgccgcgaccaagauguccgagugcguccugggccagagcaagcggguggacuucugcggcaagggguaccaccugauguccuucccccagagcgccccgcacggcguggucuuccuccacgugacguacguccccgcccaggagaagaacuucaccaccgcccccgcgaucugccacgacgggaaggcccacuucccccgcgagggcguguucguguccaacgggacccacugguucgucacgcagcggaacuucuacgagccgcagaucaucaccaccgacaacaccuucgugagcggcaacugcgacguggucaucggcaucgugaacaacacgguguacgacccccugcagcccgagcuggacuccuucaaggaggagcucgacaaguacuucaagaaccacaccagccccgacgucgaccugggggacaucuccggcaucaacgccagcguggugaacauccagaaggagaucgaccgccugaacgaggucgccaagaaccucaacgagucccugaucgaccugcaggagcucgggaaguacgagcaguacaucaaguggccgugguacaucuggcugggcuucaucgccggccugaucgcgaucgugauggugaccaucaugcucugcugcaugaccagcugcugcuccugccugaaggggugcugcagcugcggcuccugcugcaaguucgacgaggacgacagcgagcccguccugaagggggugaagcuccacuacacgugaggacuagucccuguucccagagcccacuuuuuuuucuuuuuuugaaauaaaauagccugucuuucagaucucaaaggcucuuuucagagccacca

SEQ ID NO: 26933 - RNA, 4025 nt, Artificial Sequence
  SARS-CoV-2/Wuhan/WIV05/2019__EPI_ISL_402128 spike protein mRNA gc (1-1273)(K986P_V987P) R10308
aggagaaagcuuaccauguucguguuccugguccuccugccccuggugagcucccagugcgugaaccucaccacccgcacgcagcugccgcccgccuacaccaacagcuucacccggggcgucuacuaccccgacaagguguuccgcuccagcgugcugcacuccacccaggaccucuuccugcccuucuucagcaacgucacgugguuccacgccauccacguguccgggaccaacggcaccaagcgguucgacaacccggugcugcccuucaacgacggggucuacuucgcgagcaccgagaaguccaacaucauccgcggcuggaucuucgggacgacccucgacagcaagacccagucccugcugaucgugaacaacgccaccaacguggucaucaaggugugcgaguuccaguucugcaacgaccccuuccucggcguguacuaccacaagaacaacaagagcuggauggaguccgaguuccgggucuacagcuccgccaacaacugcacguucgaguacgugagccagcccuuccugauggaccuggagggcaagcaggggaacuucaagaaccuccgcgaguucguguucaagaacaucgacggcuacuucaagaucuacuccaagcacaccccgaucaaccugguccgggaccugccccagggguucagcgcccucgagccccugguggaccugcccaucggcaucaacaucacccgcuuccagacccuccuggcccugcaccgguccuaccucacgccgggggacagcagcuccggcuggaccgcgggcgccgccgccuacuacgugggguaccugcagccccgcaccuuccugcucaaguacaacgagaacggcaccaucacggacgcggucgacugcgcccuggacccccugagcgagaccaagugcacccucaaguccuucaccguggagaaggggaucuaccagacgagcaacuuccgggugcagcccaccgaguccaucguccgcuucccgaacaucaccaaccugugccccuucggcgagguguucaacgccacccgguucgccagcgucuacgccuggaaccgcaagcggaucuccaacugcguggcggacuacagcgugcuguacaacuccgccagcuucuccacguucaagugcuacggcgucagccccaccaagcucaacgaccugugcuucaccaacguguacgccgacuccuucgugauccgcggggacgagguccggcagaucgcccccggccagaccgggaagaucgccgacuacaacuacaagcugccggacgacuucacgggcugcgugaucgcguggaacagcaacaaccucgacuccaaggucgggggcaacuacaacuaccuguaccgccuguuccgcaagagcaaccucaagcccuucgagcgggacaucuccaccgagaucuaccaggccggcagcacccccugcaacgggguggagggcuucaacugcuacuucccccugcaguccuacggguuccagccgaccaacggcgugggguaccagcccuaccggguggucgugcugagcuucgagcuccugcacgcccccgccacggugugcggccccaagaaguccaccaaccuggucaagaacaagugcgugaacuucaacuucaacggccucaccgggaccggcgugcugaccgagagcaacaagaaguuccugccguuccagcaguucgggcgcgacaucgccgacacgaccgacgcgguccgcgacccccagacccuggagauccucgacaucacccccugcagcuucggcgggguguccgugaucacgccgggcaccaacaccagcaaccaggucgccgugcuguaccaggacgugaacugcaccgagguccccguggccauccacgccgaccagcugacgcccaccuggcggguguacuccaccggcagcaacgucuuccagacccgcgccgggugccucaucggcgcggagcacgugaacaacuccuacgagugcgacauccccaucggggccggcaucugcgccagcuaccagacgcagaccaacuccccgcggcgcgcccggagcguggcgucccagagcaucaucgccuacaccaugucccugggcgccgagaacagcgucgccuacuccaacaacagcaucgccauccccaccaacuucacgaucuccgugaccaccgagauccugcccgugagcaugaccaagacgagcgucgacugcaccauguacaucugcggggacuccaccgagugcagcaaccuccugcugcaguacggcuccuucugcacccagcucaaccgcgcgcugacggggaucgccguggagcaggacaagaacacccaggagguguucgcccaggucaagcagaucuacaagacgcccccgaucaaggacuucggcggguucaacuucagccagauccugcccgaccccuccaagcccagcaagcgguccuucaucgaggaccuccuguucaacaaggugacccuggccgacgccggcuucaucaagcaguacggcgacugccucggggacaucgcggcccgcgaccugaucugcgcccagaaguucaacggccugaccgugcucccgccccugcugaccgacgagaugaucgcccaguacaccagcgcccuccuggcggggaccaucacguccggcuggaccuucggggccggcgccgcccugcagauccccuucgcgaugcagauggccuaccgguucaacggcaucggggucacccagaacgugcucuacgagaaccagaagcugaucgccaaccaguucaacagcgccaucggcaagauccaggacucccugagcuccaccgccagcgcgcucgggaagcugcaggacguggucaaccagaacgcccaggcccugaacacgcucgugaagcagcuguccagcaacuucggcgccaucuccagcgugcugaacgacauccucucccgccuggacccgcccgaggccgaggugcagaucgaccggcugaucaccgggcgccuccagagccugcagaccuacgugacccagcagcugauccgggcggccgagauccgcgccagcgccaaccucgccgcgaccaagauguccgagugcguccugggccagagcaagcggguggacuucugcggcaagggguaccaccugauguccuucccccagagcgccccgcacggcguggucuuccuccacgugacguacguccccgcccaggagaagaacuucaccaccgcccccgcgaucugccacgacgggaaggcccacuucccccgcgagggcguguucguguccaacgggacccacugguucgucacgcagcggaacuucuacgagccgcagaucaucaccaccgacaacaccuucgugagcggcaacugcgacguggucaucggcaucgugaacaacacgguguacgacccccugcagcccgagcuggacuccuucaaggaggagcucgacaaguacuucaagaaccacaccagccccgacgucgaccugggggacaucuccggcaucaacgccagcguggugaacauccagaaggagaucgaccgccugaacgaggucgccaagaaccucaacgagucccugaucgaccugcaggagcucgggaaguacgagcaguacaucaaguggccgugguacaucuggcugggcuucaucgccggccugaucgcgaucgugauggugaccaucaugcucugcugcaugaccagcugcugcuccugccugaaggggugcugcagcugcggcuccugcugcaaguucgacgaggacgacagcgagcccguccugaagggggugaagcuccacuacacgugaggacuaguuauaagacugacuagcccgaugggccucccaacgggcccuccuccccuccuugcaccgagauuaauaaaaaaaaaaaaaaaaaaaaaaaaaaaaaaaaaaaaaaaaaaaaaaaaaaugcaucccccccccccccccccccccccccccccccaaaggcucuuuucagagccaccagaauu

SEQ ID NO: 26934 - RNA, 4010 nt, Artificial Sequence
  SARS-CoV-2/Wuhan/WIV05/2019__EPI_ISL_402128 spike protein mRNA gc (1-1273)(K986P_V987P) R10309
aggagaaagcuuaccauguucguguuccugguccuccugccccuggugagcucccagugcgugaaccucaccacccgcacgcagcugccgcccgccuacaccaacagcuucacccggggcgucuacuaccccgacaagguguuccgcuccagcgugcugcacuccacccaggaccucuuccugcccuucuucagcaacgucacgugguuccacgccauccacguguccgggaccaacggcaccaagcgguucgacaacccggugcugcccuucaacgacggggucuacuucgcgagcaccgagaaguccaacaucauccgcggcuggaucuucgggacgacccucgacagcaagacccagucccugcugaucgugaacaacgccaccaacguggucaucaaggugugcgaguuccaguucugcaacgaccccuuccucggcguguacuaccacaagaacaacaagagcuggauggaguccgaguuccgggucuacagcuccgccaacaacugcacguucgaguacgugagccagcccuuccugauggaccuggagggcaagcaggggaacuucaagaaccuccgcgaguucguguucaagaacaucgacggcuacuucaagaucuacuccaagcacaccccgaucaaccugguccgggaccugccccagggguucagcgcccucgagccccugguggaccugcccaucggcaucaacaucacccgcuuccagacccuccuggcccugcaccgguccuaccucacgccgggggacagcagcuccggcuggaccgcgggcgccgccgccuacuacgugggguaccugcagccccgcaccuuccugcucaaguacaacgagaacggcaccaucacggacgcggucgacugcgcccuggacccccugagcgagaccaagugcacccucaaguccuucaccguggagaaggggaucuaccagacgagcaacuuccgggugcagcccaccgaguccaucguccgcuucccgaacaucaccaaccugugccccuucggcgagguguucaacgccacccgguucgccagcgucuacgccuggaaccgcaagcggaucuccaacugcguggcggacuacagcgugcuguacaacuccgccagcuucuccacguucaagugcuacggcgucagccccaccaagcucaacgaccugugcuucaccaacguguacgccgacuccuucgugauccgcggggacgagguccggcagaucgcccccggccagaccgggaagaucgccgacuacaacuacaagcugccggacgacuucacgggcugcgugaucgcguggaacagcaacaaccucgacuccaaggucgggggcaacuacaacuaccuguaccgccuguuccgcaagagcaaccucaagcccuucgagcgggacaucuccaccgagaucuaccaggccggcagcacccccugcaacgggguggagggcuucaacugcuacuucccccugcaguccuacggguuccagccgaccaacggcgugggguaccagcccuaccggguggucgugcugagcuucgagcuccugcacgcccccgccacggugugcggccccaagaaguccaccaaccuggucaagaacaagugcgugaacuucaacuucaacggccucaccgggaccggcgugcugaccgagagcaacaagaaguuccugccguuccagcaguucgggcgcgacaucgccgacacgaccgacgcgguccgcgacccccagacccuggagauccucgacaucacccccugcagcuucggcgggguguccgugaucacgccgggcaccaacaccagcaaccaggucgccgugcuguaccaggacgugaacugcaccgagguccccguggccauccacgccgaccagcugacgcccaccuggcggguguacuccaccggcagcaacgucuuccagacccgcgccgggugccucaucggcgcggagcacgugaacaacuccuacgagugcgacauccccaucggggccggcaucugcgccagcuaccagacgcagaccaacuccccgcggcgcgcccggagcguggcgucccagagcaucaucgccuacaccaugucccugggcgccgagaacagcgucgccuacuccaacaacagcaucgccauccccaccaacuucacgaucuccgugaccaccgagauccugcccgugagcaugaccaagacgagcgucgacugcaccauguacaucugcggggacuccaccgagugcagcaaccuccugcugcaguacggcuccuucugcacccagcucaaccgcgcgcugacggggaucgccguggagcaggacaagaacacccaggagguguucgcccaggucaagcagaucuacaagacgcccccgaucaaggacuucggcggguucaacuucagccagauccugcccgaccccuccaagcccagcaagcgguccuucaucgaggaccuccuguucaacaaggugacccuggccgacgccggcuucaucaagcaguacggcgacugccucggggacaucgcggcccgcgaccugaucugcgcccagaaguucaacggccugaccgugcucccgccccugcugaccgacgagaugaucgcccaguacaccagcgcccuccuggcggggaccaucacguccggcuggaccuucggggccggcgccgcccugcagauccccuucgcgaugcagauggccuaccgguucaacggcaucggggucacccagaacgugcucuacgagaaccagaagcugaucgccaaccaguucaacagcgccaucggcaagauccaggacucccugagcuccaccgccagcgcgcucgggaagcugcaggacguggucaaccagaacgcccaggcccugaacacgcucgugaagcagcuguccagcaacuucggcgccaucuccagcgugcugaacgacauccucucccgccuggacccgcccgaggccgaggugcagaucgaccggcugaucaccgggcgccuccagagccugcagaccuacgugacccagcagcugauccgggcggccgagauccgcgccagcgccaaccucgccgcgaccaagauguccgagugcguccugggccagagcaagcggguggacuucugcggcaagggguaccaccugauguccuucccccagagcgccccgcacggcguggucuuccuccacgugacguacguccccgcccaggagaagaacuucaccaccgcccccgcgaucugccacgacgggaaggcccacuucccccgcgagggcguguucguguccaacgggacccacugguucgucacgcagcggaacuucuacgagccgcagaucaucaccaccgacaacaccuucgugagcggcaacugcgacguggucaucggcaucgugaacaacacgguguacgacccccugcagcccgagcuggacuccuucaaggaggagcucgacaaguacuucaagaaccacaccagccccgacgucgaccugggggacaucuccggcaucaacgccagcguggugaacauccagaaggagaucgaccgccugaacgaggucgccaagaaccucaacgagucccugaucgaccugcaggagcucgggaaguacgagcaguacaucaaguggccgugguacaucuggcugggcuucaucgccggccugaucgcgaucgugauggugaccaucaugcucugcugcaugaccagcugcugcuccugccugaaggggugcugcagcugcggcuccugcugcaaguucgacgaggacgacagcgagcccguccugaagggggugaagcuccacuacacgugaggacuaguuauaagacugacuagcccgaugggccucccaacgggcccuccuccccuccuugcaccgagauuaauaaaaaaaaaaaaaaaaaaaaaaaaaaaaaaaaaaaugcaucccccccccccccccccccccccccccccccaaaggcucuuuucagagccaccagaauu

SEQ ID NO: 26935 - RNA, 4000 nt, Artificial Sequence
  SARS-CoV-2/Wuhan/WIV05/2019__EPI_ISL_402128 spike protein mRNA gc (1-1273)(K986P_V987P) R10310
aggagaaagcuuaccauguucguguuccugguccuccugccccuggugagcucccagugcgugaaccucaccacccgcacgcagcugccgcccgccuacaccaacagcuucacccggggcgucuacuaccccgacaagguguuccgcuccagcgugcugcacuccacccaggaccucuuccugcccuucuucagcaacgucacgugguuccacgccauccacguguccgggaccaacggcaccaagcgguucgacaacccggugcugcccuucaacgacggggucuacuucgcgagcaccgagaaguccaacaucauccgcggcuggaucuucgggacgacccucgacagcaagacccagucccugcugaucgugaacaacgccaccaacguggucaucaaggugugcgaguuccaguucugcaacgaccccuuccucggcguguacuaccacaagaacaacaagagcuggauggaguccgaguuccgggucuacagcuccgccaacaacugcacguucgaguacgugagccagcccuuccugauggaccuggagggcaagcaggggaacuucaagaaccuccgcgaguucguguucaagaacaucgacggcuacuucaagaucuacuccaagcacaccccgaucaaccugguccgggaccugccccagggguucagcgcccucgagccccugguggaccugcccaucggcaucaacaucacccgcuuccagacccuccuggcccugcaccgguccuaccucacgccgggggacagcagcuccggcuggaccgcgggcgccgccgccuacuacgugggguaccugcagccccgcaccuuccugcucaaguacaacgagaacggcaccaucacggacgcggucgacugcgcccuggacccccugagcgagaccaagugcacccucaaguccuucaccguggagaaggggaucuaccagacgagcaacuuccgggugcagcccaccgaguccaucguccgcuucccgaacaucaccaaccugugccccuucggcgagguguucaacgccacccgguucgccagcgucuacgccuggaaccgcaagcggaucuccaacugcguggcggacuacagcgugcuguacaacuccgccagcuucuccacguucaagugcuacggcgucagccccaccaagcucaacgaccugugcuucaccaacguguacgccgacuccuucgugauccgcggggacgagguccggcagaucgcccccggccagaccgggaagaucgccgacuacaacuacaagcugccggacgacuucacgggcugcgugaucgcguggaacagcaacaaccucgacuccaaggucgggggcaacuacaacuaccuguaccgccuguuccgcaagagcaaccucaagcccuucgagcgggacaucuccaccgagaucuaccaggccggcagcacccccugcaacgggguggagggcuucaacugcuacuucccccugcaguccuacggguuccagccgaccaacggcgugggguaccagcccuaccggguggucgugcugagcuucgagcuccugcacgcccccgccacggugugcggccccaagaaguccaccaaccuggucaagaacaagugcgugaacuucaacuucaacggccucaccgggaccggcgugcugaccgagagcaacaagaaguuccugccguuccagcaguucgggcgcgacaucgccgacacgaccgacgcgguccgcgacccccagacccuggagauccucgacaucacccccugcagcuucggcgggguguccgugaucacgccgggcaccaacaccagcaaccaggucgccgugcuguaccaggacgugaacugcaccgagguccccguggccauccacgccgaccagcugacgcccaccuggcggguguacuccaccggcagcaacgucuuccagacccgcgccgggugccucaucggcgcggagcacgugaacaacuccuacgagugcgacauccccaucggggccggcaucugcgccagcuaccagacgcagaccaacuccccgcggcgcgcccggagcguggcgucccagagcaucaucgccuacaccaugucccugggcgccgagaacagcgucgccuacuccaacaacagcaucgccauccccaccaacuucacgaucuccgugaccaccgagauccugcccgugagcaugaccaagacgagcgucgacugcaccauguacaucugcggggacuccaccgagugcagcaaccuccugcugcaguacggcuccuucugcacccagcucaaccgcgcgcugacggggaucgccguggagcaggacaagaacacccaggagguguucgcccaggucaagcagaucuacaagacgcccccgaucaaggacuucggcggguucaacuucagccagauccugcccgaccccuccaagcccagcaagcgguccuucaucgaggaccuccuguucaacaaggugacccuggccgacgccggcuucaucaagcaguacggcgacugccucggggacaucgcggcccgcgaccugaucugcgcccagaaguucaacggccugaccgugcucccgccccugcugaccgacgagaugaucgcccaguacaccagcgcccuccuggcggggaccaucacguccggcuggaccuucggggccggcgccgcccugcagauccccuucgcgaugcagauggccuaccgguucaacggcaucggggucacccagaacgugcucuacgagaaccagaagcugaucgccaaccaguucaacagcgccaucggcaagauccaggacucccugagcuccaccgccagcgcgcucgggaagcugcaggacguggucaaccagaacgcccaggcccugaacacgcucgugaagcagcuguccagcaacuucggcgccaucuccagcgugcugaacgacauccucucccgccuggacccgcccgaggccgaggugcagaucgaccggcugaucaccgggcgccuccagagccugcagaccuacgugacccagcagcugauccgggcggccgagauccgcgccagcgccaaccucgccgcgaccaagauguccgagugcguccugggccagagcaagcggguggacuucugcggcaagggguaccaccugauguccuucccccagagcgccccgcacggcguggucuuccuccacgugacguacguccccgcccaggagaagaacuucaccaccgcccccgcgaucugccacgacgggaaggcccacuucccccgcgagggcguguucguguccaacgggacccacugguucgucacgcagcggaacuucuacgagccgcagaucaucaccaccgacaacaccuucgugagcggcaacugcgacguggucaucggcaucgugaacaacacgguguacgacccccugcagcccgagcuggacuccuucaaggaggagcucgacaaguacuucaagaaccacaccagccccgacgucgaccugggggacaucuccggcaucaacgccagcguggugaacauccagaaggagaucgaccgccugaacgaggucgccaagaaccucaacgagucccugaucgaccugcaggagcucgggaaguacgagcaguacaucaaguggccgugguacaucuggcugggcuucaucgccggccugaucgcgaucgugauggugaccaucaugcucugcugcaugaccagcugcugcuccugccugaaggggugcugcagcugcggcuccugcugcaaguucgacgaggacgacagcgagcccguccugaagggggugaagcuccacuacacgugaggacuaguuauaagacugacuagcccgaugggccucccaacgggcccuccuccccuccuugcaccgagauuaauaaaaaaaaaaaaaaaaaaaaaaaaaugcaucccccccccccccccccccccccccccccccaaaggcucuuuucagagccaccagaauu

SEQ ID NO: 26936 - RNA, 4048 nt, Artificial Sequence
  SARS-CoV-2/Wuhan/WIV05/2019__EPI_ISL_402128 spike protein mRNA gc (1-1273)(K986P_V987P) R10311
aggagaaagcuuaccauguucguguuccugguccuccugccccuggugagcucccagugcgugaaccucaccacccgcacgcagcugccgcccgccuacaccaacagcuucacccggggcgucuacuaccccgacaagguguuccgcuccagcgugcugcacuccacccaggaccucuuccugcccuucuucagcaacgucacgugguuccacgccauccacguguccgggaccaacggcaccaagcgguucgacaacccggugcugcccuucaacgacggggucuacuucgcgagcaccgagaaguccaacaucauccgcggcuggaucuucgggacgacccucgacagcaagacccagucccugcugaucgugaacaacgccaccaacguggucaucaaggugugcgaguuccaguucugcaacgaccccuuccucggcguguacuaccacaagaacaacaagagcuggauggaguccgaguuccgggucuacagcuccgccaacaacugcacguucgaguacgugagccagcccuuccugauggaccuggagggcaagcaggggaacuucaagaaccuccgcgaguucguguucaagaacaucgacggcuacuucaagaucuacuccaagcacaccccgaucaaccugguccgggaccugccccagggguucagcgcccucgagccccugguggaccugcccaucggcaucaacaucacccgcuuccagacccuccuggcccugcaccgguccuaccucacgccgggggacagcagcuccggcuggaccgcgggcgccgccgccuacuacgugggguaccugcagccccgcaccuuccugcucaaguacaacgagaacggcaccaucacggacgcggucgacugcgcccuggacccccugagcgagaccaagugcacccucaaguccuucaccguggagaaggggaucuaccagacgagcaacuuccgggugcagcccaccgaguccaucguccgcuucccgaacaucaccaaccugugccccuucggcgagguguucaacgccacccgguucgccagcgucuacgccuggaaccgcaagcggaucuccaacugcguggcggacuacagcgugcuguacaacuccgccagcuucuccacguucaagugcuacggcgucagccccaccaagcucaacgaccugugcuucaccaacguguacgccgacuccuucgugauccgcggggacgagguccggcagaucgcccccggccagaccgggaagaucgccgacuacaacuacaagcugccggacgacuucacgggcugcgugaucgcguggaacagcaacaaccucgacuccaaggucgggggcaacuacaacuaccuguaccgccuguuccgcaagagcaaccucaagcccuucgagcgggacaucuccaccgagaucuaccaggccggcagcacccccugcaacgggguggagggcuucaacugcuacuucccccugcaguccuacggguuccagccgaccaacggcgugggguaccagcccuaccggguggucgugcugagcuucgagcuccugcacgcccccgccacggugugcggccccaagaaguccaccaaccuggucaagaacaagugcgugaacuucaacuucaacggccucaccgggaccggcgugcugaccgagagcaacaagaaguuccugccguuccagcaguucgggcgcgacaucgccgacacgaccgacgcgguccgcgacccccagacccuggagauccucgacaucacccccugcagcuucggcgggguguccgugaucacgccgggcaccaacaccagcaaccaggucgccgugcuguaccaggacgugaacugcaccgagguccccguggccauccacgccgaccagcugacgcccaccuggcggguguacuccaccggcagcaacgucuuccagacccgcgccgggugccucaucggcgcggagcacgugaacaacuccuacgagugcgacauccccaucggggccggcaucugcgccagcuaccagacgcagaccaacuccccgcggcgcgcccggagcguggcgucccagagcaucaucgccuacaccaugucccugggcgccgagaacagcgucgccuacuccaacaacagcaucgccauccccaccaacuucacgaucuccgugaccaccgagauccugcccgugagcaugaccaagacgagcgucgacugcaccauguacaucugcggggacuccaccgagugcagcaaccuccugcugcaguacggcuccuucugcacccagcucaaccgcgcgcugacggggaucgccguggagcaggacaagaacacccaggagguguucgcccaggucaagcagaucuacaagacgcccccgaucaaggacuucggcggguucaacuucagccagauccugcccgaccccuccaagcccagcaagcgguccuucaucgaggaccuccuguucaacaaggugacccuggccgacgccggcuucaucaagcaguacggcgacugccucggggacaucgcggcccgcgaccugaucugcgcccagaaguucaacggccugaccgugcucccgccccugcugaccgacgagaugaucgcccaguacaccagcgcccuccuggcggggaccaucacguccggcuggaccuucggggccggcgccgcccugcagauccccuucgcgaugcagauggccuaccgguucaacggcaucggggucacccagaacgugcucuacgagaaccagaagcugaucgccaaccaguucaacagcgccaucggcaagauccaggacucccugagcuccaccgccagcgcgcucgggaagcugcaggacguggucaaccagaacgcccaggcccugaacacgcucgugaagcagcuguccagcaacuucggcgccaucuccagcgugcugaacgacauccucucccgccuggacccgcccgaggccgaggugcagaucgaccggcugaucaccgggcgccuccagagccugcagaccuacgugacccagcagcugauccgggcggccgagauccgcgccagcgccaaccucgccgcgaccaagauguccgagugcguccugggccagagcaagcggguggacuucugcggcaagggguaccaccugauguccuucccccagagcgccccgcacggcguggucuuccuccacgugacguacguccccgcccaggagaagaacuucaccaccgcccccgcgaucugccacgacgggaaggcccacuucccccgcgagggcguguucguguccaacgggacccacugguucgucacgcagcggaacuucuacgagccgcagaucaucaccaccgacaacaccuucgugagcggcaacugcgacguggucaucggcaucgugaacaacacgguguacgacccccugcagcccgagcuggacuccuucaaggaggagcucgacaaguacuucaagaaccacaccagccccgacgucgaccugggggacaucuccggcaucaacgccagcguggugaacauccagaaggagaucgaccgccugaacgaggucgccaagaaccucaacgagucccugaucgaccugcaggagcucgggaaguacgagcaguacaucaaguggccgugguacaucuggcugggcuucaucgccggccugaucgcgaucgugauggugaccaucaugcucugcugcaugaccagcugcugcuccugccugaaggggugcugcagcugcggcuccugcugcaaguucgacgaggacgacagcgagcccguccugaagggggugaagcuccacuacacgugaggacuaguuauaagacugacuagcccgaugggccucccaacgggcccuccuccccuccuugcaccgagauuaauaaaaaaaaaaaaaaaaaaaaaaaaaaaaaaaaaaaaaaaaaaaaaaaaaaaaaaaaaaaaaaaaaaaaaaaaaugcaucccccccccccccccccccccccccccccccaaaggcucuuuucagagccaccagaauu

SEQ ID NO: 26937 - RNA, 3940 nt, Artificial Sequence
  SARS-CoV-2/Wuhan/WIV05/2019__EPI_ISL_402128 spike protein mRNA gc (1-1273)(K986P_V987P) R10312
aggagaaagcuuaccauguucguguuccugguccuccugccccuggugagcucccagugcgugaaccucaccacccgcacgcagcugccgcccgccuacaccaacagcuucacccggggcgucuacuaccccgacaagguguuccgcuccagcgugcugcacuccacccaggaccucuuccugcccuucuucagcaacgucacgugguuccacgccauccacguguccgggaccaacggcaccaagcgguucgacaacccggugcugcccuucaacgacggggucuacuucgcgagcaccgagaaguccaacaucauccgcggcuggaucuucgggacgacccucgacagcaagacccagucccugcugaucgugaacaacgccaccaacguggucaucaaggugugcgaguuccaguucugcaacgaccccuuccucggcguguacuaccacaagaacaacaagagcuggauggaguccgaguuccgggucuacagcuccgccaacaacugcacguucgaguacgugagccagcccuuccugauggaccuggagggcaagcaggggaacuucaagaaccuccgcgaguucguguucaagaacaucgacggcuacuucaagaucuacuccaagcacaccccgaucaaccugguccgggaccugccccagggguucagcgcccucgagccccugguggaccugcccaucggcaucaacaucacccgcuuccagacccuccuggcccugcaccgguccuaccucacgccgggggacagcagcuccggcuggaccgcgggcgccgccgccuacuacgugggguaccugcagccccgcaccuuccugcucaaguacaacgagaacggcaccaucacggacgcggucgacugcgcccuggacccccugagcgagaccaagugcacccucaaguccuucaccguggagaaggggaucuaccagacgagcaacuuccgggugcagcccaccgaguccaucguccgcuucccgaacaucaccaaccugugccccuucggcgagguguucaacgccacccgguucgccagcgucuacgccuggaaccgcaagcggaucuccaacugcguggcggacuacagcgugcuguacaacuccgccagcuucuccacguucaagugcuacggcgucagccccaccaagcucaacgaccugugcuucaccaacguguacgccgacuccuucgugauccgcggggacgagguccggcagaucgcccccggccagaccgggaagaucgccgacuacaacuacaagcugccggacgacuucacgggcugcgugaucgcguggaacagcaacaaccucgacuccaaggucgggggcaacuacaacuaccuguaccgccuguuccgcaagagcaaccucaagcccuucgagcgggacaucuccaccgagaucuaccaggccggcagcacccccugcaacgggguggagggcuucaacugcuacuucccccugcaguccuacggguuccagccgaccaacggcgugggguaccagcccuaccggguggucgugcugagcuucgagcuccugcacgcccccgccacggugugcggccccaagaaguccaccaaccuggucaagaacaagugcgugaacuucaacuucaacggccucaccgggaccggcgugcugaccgagagcaacaagaaguuccugccguuccagcaguucgggcgcgacaucgccgacacgaccgacgcgguccgcgacccccagacccuggagauccucgacaucacccccugcagcuucggcgggguguccgugaucacgccgggcaccaacaccagcaaccaggucgccgugcuguaccaggacgugaacugcaccgagguccccguggccauccacgccgaccagcugacgcccaccuggcggguguacuccaccggcagcaacgucuuccagacccgcgccgggugccucaucggcgcggagcacgugaacaacuccuacgagugcgacauccccaucggggccggcaucugcgccagcuaccagacgcagaccaacuccccgcggcgcgcccggagcguggcgucccagagcaucaucgccuacaccaugucccugggcgccgagaacagcgucgccuacuccaacaacagcaucgccauccccaccaacuucacgaucuccgugaccaccgagauccugcccgugagcaugaccaagacgagcgucgacugcaccauguacaucugcggggacuccaccgagugcagcaaccuccugcugcaguacggcuccuucugcacccagcucaaccgcgcgcugacggggaucgccguggagcaggacaagaacacccaggagguguucgcccaggucaagcagaucuacaagacgcccccgaucaaggacuucggcggguucaacuucagccagauccugcccgaccccuccaagcccagcaagcgguccuucaucgaggaccuccuguucaacaaggugacccuggccgacgccggcuucaucaagcaguacggcgacugccucggggacaucgcggcccgcgaccugaucugcgcccagaaguucaacggccugaccgugcucccgccccugcugaccgacgagaugaucgcccaguacaccagcgcccuccuggcggggaccaucacguccggcuggaccuucggggccggcgccgcccugcagauccccuucgcgaugcagauggccuaccgguucaacggcaucggggucacccagaacgugcucuacgagaaccagaagcugaucgccaaccaguucaacagcgccaucggcaagauccaggacucccugagcuccaccgccagcgcgcucgggaagcugcaggacguggucaaccagaacgcccaggcccugaacacgcucgugaagcagcuguccagcaacuucggcgccaucuccagcgugcugaacgacauccucucccgccuggacccgcccgaggccgaggugcagaucgaccggcugaucaccgggcgccuccagagccugcagaccuacgugacccagcagcugauccgggcggccgagauccgcgccagcgccaaccucgccgcgaccaagauguccgagugcguccugggccagagcaagcggguggacuucugcggcaagggguaccaccugauguccuucccccagagcgccccgcacggcguggucuuccuccacgugacguacguccccgcccaggagaagaacuucaccaccgcccccgcgaucugccacgacgggaaggcccacuucccccgcgagggcguguucguguccaacgggacccacugguucgucacgcagcggaacuucuacgagccgcagaucaucaccaccgacaacaccuucgugagcggcaacugcgacguggucaucggcaucgugaacaacacgguguacgacccccugcagcccgagcuggacuccuucaaggaggagcucgacaaguacuucaagaaccacaccagccccgacgucgaccugggggacaucuccggcaucaacgccagcguggugaacauccagaaggagaucgaccgccugaacgaggucgccaagaaccucaacgagucccugaucgaccugcaggagcucgggaaguacgagcaguacaucaaguggccgugguacaucuggcugggcuucaucgccggccugaucgcgaucgugauggugaccaucaugcucugcugcaugaccagcugcugcuccugccugaaggggugcugcagcugcggcuccugcugcaaguucgacgaggacgacagcgagcccguccugaagggggugaagcuccacuacacgugaggacuaguuauaagacugacuagcccgaugggccucccaacgggcccuccuccccuccuugcaccgagauuaaucaaaggcucuuuucagagccaccagaauu

SEQ ID NO: 26938 - protein, 266 aa, Artificial Sequence
  SARS-CoV-2/Wuhan/WIV05/2019__EPI_ISL_402128 spike protein (1-16,327-528) Foldon construct
MFVFLVLLPLVSSQCVVRFPNITNLCPFGEVFNATRFASVYAWNRKRISNCVADYSVLYNSASFSTFKCYGVSPTKLNDLCFTNVYADSFVIRGDEVRQIAPGQTGKIADYNYKLPDDFTGCVIAWNSNNLDSKVGGNYNYLYRLFRKSNLKPFERDISTEIYQAGSTPCNGVEGFNCYFPLQSYGFQPTNGVGYQPYRVVVLSFELLHAPATVCGPKGSPGSGSGSGYIPEAPRDGQAYVRKDGEWVLLSTFLGRSLEVLFQGPG

SEQ ID NO: 26939 - protein, 311 aa, Artificial Sequence
  SARS-CoV-2/Wuhan/WIV05/2019__EPI_ISL_402128 spike protein (1-19,327-528,1207-1254) Foldon construct
MFVFLVLLPLVSSQCVNLTVRFPNITNLCPFGEVFNATRFASVYAWNRKRISNCVADYSVLYNSASFSTFKCYGVSPTKLNDLCFTNVYADSFVIRGDEVRQIAPGQTGKIADYNYKLPDDFTGCVIAWNSNNLDSKVGGNYNYLYRLFRKSNLKPFERDISTEIYQAGSTPCNGVEGFNCYFPLQSYGFQPTNGVGYQPYRVVVLSFELLHAPATVCGPKGSPGSGSGSGYIPEAPRDGQAYVRKDGEWVLLSTFLGSGSGSEQYIKWPWYIWLGFIAGLIAIVMVTIMLCCMTSCCSCLKGCCSCGSCC

SEQ ID NO: 26940 - RNA, 801 nt, Artificial Sequence
  SARS-CoV-2/Wuhan/WIV05/2019__EPI_ISL_402128 spike protein CDS gc mod (1-16,327-528) Foldon construct
auguuuguguuucuugugcugcugccucuugugucuucucaguguguggugagauuuccaaauauuacaaaucuguguccauuuggagaaguguuuaaugcaacaagauuugcaucuguguaugcauggaauagaaaaagaauuucuaauuguguggcugauuauucugugcuguauaauagugcuucuuuuuccacauuuaaauguuauggagugucuccaacaaaauuaaaugauuuauguuuuacaaauguguaugcugauucuuuugugaucagaggugaugaagugagacagauugcccccggacagacaggaaaaauugcugauuacaauuacaaacugccugaugauuuuacaggaugugugauugcuuggaauucuaauaauuuagauucuaaagugggaggaaauuacaauuaucuguacagacuguuuagaaaaucaaaucugaaaccuuuugaaagagauauuucaacagaaauuuaucaggcuggaucaacaccuuguaauggaguggaaggauuuaauuguuauuuuccauuacagagcuauggauuucagccaaccaauggugugggauaucagccauauagagugguggugcugucuuuugaacugcugcaugcaccugcaacaguguguggaccuaaaggcucccccggcuccggcuccggaucugguuauauuccugaagcuccaagagaugggcaagcuuacguucguaaagauggcgaauggguauuacuuucuaccuuuuuaggccggucccuggaggugcuguuccagggccccggcuga

SEQ ID NO: 26941 - RNA, 936 nt, Artificial Sequence
  SARS-CoV-2/Wuhan/WIV05/2019__EPI_ISL_402128 spike protein CDS gc mod (1-19,327-528,1207-1254) Foldon construct
auguuuguguuucuugugcugcugccucuugugucuucucagugugugaauuugacagugagauuuccaaauauuacaaaucuguguccauuuggagaaguguuuaaugcaacaagauuugcaucuguguaugcauggaauagaaaaagaauuucuaauuguguggcugauuauucugugcuguauaauagugcuucuuuuuccacauuuaaauguuauggagugucuccaacaaaauuaaaugauuuauguuuuacaaauguguaugcugauucuuuugugaucagaggugaugaagugagacagauugcccccggacagacaggaaaaauugcugauuacaauuacaaacugccugaugauuuuacaggaugugugauugcuuggaauucuaauaauuuagauucuaaagugggaggaaauuacaauuaucuguacagacuguuuagaaaaucaaaucugaaaccuuuugaaagagauauuucaacagaaauuuaucaggcuggaucaacaccuuguaauggaguggaaggauuuaauuguuauuuuccauuacagagcuauggauuucagccaaccaauggugugggauaucagccauauagagugguggugcugucuuuugaacugcugcaugcaccugcaacaguguguggaccuaaaggcucccccggcuccggcuccggaucugguuauauuccugaagcuccaagagaugggcaagcuuacguucguaaagauggcgaauggguauuacuuucuaccuuuuuaggaagcggcagcggaucugaacaguacauuaaauggccuugguacauuuggcuuggauuuauugcaggauuaauugcaauugugauggugacaauuauguuauguuguaugacaucauguuguucuuguuuaaaaggauguuguucuuguggaagcuguuguuga

SEQ ID NO: 26942 - RNA, 1262 nt, Artificial Sequence
  SARS-CoV-2/Wuhan/WIV05/2019__EPI_ISL_402128 spike protein mRNA gc mod (1-16,327-528) Foldon construct
agaauaaacuaguauucuucugguccccacagacucagagagaacccgccaccauguuuguguuucuugugcugcugccucuugugucuucucaguguguggugagauuuccaaauauuacaaaucuguguccauuuggagaaguguuuaaugcaacaagauuugcaucuguguaugcauggaauagaaaaagaauuucuaauuguguggcugauuauucugugcuguauaauagugcuucuuuuuccacauuuaaauguuauggagugucuccaacaaaauuaaaugauuuauguuuuacaaauguguaugcugauucuuuugugaucagaggugaugaagugagacagauugcccccggacagacaggaaaaauugcugauuacaauuacaaacugccugaugauuuuacaggaugugugauugcuuggaauucuaauaauuuagauucuaaagugggaggaaauuacaauuaucuguacagacuguuuagaaaaucaaaucugaaaccuuuugaaagagauauuucaacagaaauuuaucaggcuggaucaacaccuuguaauggaguggaaggauuuaauuguuauuuuccauuacagagcuauggauuucagccaaccaauggugugggauaucagccauauagagugguggugcugucuuuugaacugcugcaugcaccugcaacaguguguggaccuaaaggcucccccggcuccggcuccggaucugguuauauuccugaagcuccaagagaugggcaagcuuacguucguaaagauggcgaauggguauuacuuucuaccuuuuuaggccggucccuggaggugcuguuccagggccccggcugaugacucgagcugguacugcaugcacgcaaugcuagcugccccuuucccguccuggguaccccgagucucccccgaccucgggucccagguaugcucccaccuccaccugccccacucaccaccucugcuaguuccagacaccucccaagcacgcagcaaugcagcucaaaacgcuuagccuagccacacccccacgggaaacagcagugauuaaccuuuagcaauaaacgaaaguuuaacuaagcuauacuaaccccaggguuggucaauuucgugccagccacacccuggagcuagcaaaaaaaaaaaaaaaaaaaaaaaaaaaaaagcauaugacuaaaaaaaaaaaaaaaaaaaaaaaaaaaaaaaaaaaaaaaaaaaaaaaaaaaaaaaaaaaaaaaaaaaaaa

SEQ ID NO: 26943 - RNA, 1261 nt, Artificial Sequence
  SARS-CoV-2/Wuhan/WIV05/2019__EPI_ISL_402128 spike protein mRNA gc mod (1-16,327-528) Foldon construct
gggcgaacuaguauucuucugguccccacagacucagagagaacccgccaccauguuuguguuucuugugcugcugccucuugugucuucucaguguguggugagauuuccaaauauuacaaaucuguguccauuuggagaaguguuuaaugcaacaagauuugcaucuguguaugcauggaauagaaaaagaauuucuaauuguguggcugauuauucugugcuguauaauagugcuucuuuuuccacauuuaaauguuauggagugucuccaacaaaauuaaaugauuuauguuuuacaaauguguaugcugauucuuuugugaucagaggugaugaagugagacagauugcccccggacagacaggaaaaauugcugauuacaauuacaaacugccugaugauuuuacaggaugugugauugcuuggaauucuaauaauuuagauucuaaagugggaggaaauuacaauuaucuguacagacuguuuagaaaaucaaaucugaaaccuuuugaaagagauauuucaacagaaauuuaucaggcuggaucaacaccuuguaauggaguggaaggauuuaauuguuauuuuccauuacagagcuauggauuucagccaaccaauggugugggauaucagccauauagagugguggugcugucuuuugaacugcugcaugcaccugcaacaguguguggaccuaaaggcucccccggcuccggcuccggaucugguuauauuccugaagcuccaagagaugggcaagcuuacguucguaaagauggcgaauggguauuacuuucuaccuuuuuaggccggucccuggaggugcuguuccagggccccggcugaugacucgagcugguacugcaugcacgcaaugcuagcugccccuuucccguccuggguaccccgagucucccccgaccucgggucccagguaugcucccaccuccaccugccccacucaccaccucugcuaguuccagacaccucccaagcacgcagcaaugcagcucaaaacgcuuagccuagccacacccccacgggaaacagcagugauuaaccuuuagcaauaaacgaaaguuuaacuaagcuauacuaaccccaggguuggucaauuucgugccagccacacccuggagcuagcaaaaaaaaaaaaaaaaaaaaaaaaaaaaaagcauaugacuaaaaaaaaaaaaaaaaaaaaaaaaaaaaaaaaaaaaaaaaaaaaaaaaaaaaaaaaaaaaaaaaaaaaaa

SEQ ID NO: 26944 - RNA, 1397 nt, Artificial Sequence
  SARS-CoV-2/Wuhan/WIV05/2019__EPI_ISL_402128 spike protein mRNA gc mod (1-19,327-528,1207-1254) Foldon construct
agaauaaacuaguauucuucugguccccacagacucagagagaacccgccaccauguuuguguuucuugugcugcugccucuugugucuucucagugugugaauuugacagugagauuuccaaauauuacaaaucuguguccauuuggagaaguguuuaaugcaacaagauuugcaucuguguaugcauggaauagaaaaagaauuucuaauuguguggcugauuauucugugcuguauaauagugcuucuuuuuccacauuuaaauguuauggagugucuccaacaaaauuaaaugauuuauguuuuacaaauguguaugcugauucuuuugugaucagaggugaugaagugagacagauugcccccggacagacaggaaaaauugcugauuacaauuacaaacugccugaugauuuuacaggaugugugauugcuuggaauucuaauaauuuagauucuaaagugggaggaaauuacaauuaucuguacagacuguuuagaaaaucaaaucugaaaccuuuugaaagagauauuucaacagaaauuuaucaggcuggaucaacaccuuguaauggaguggaaggauuuaauuguuauuuuccauuacagagcuauggauuucagccaaccaauggugugggauaucagccauauagagugguggugcugucuuuugaacugcugcaugcaccugcaacaguguguggaccuaaaggcucccccggcuccggcuccggaucugguuauauuccugaagcuccaagagaugggcaagcuuacguucguaaagauggcgaauggguauuacuuucuaccuuuuuaggaagcggcagcggaucugaacaguacauuaaauggccuugguacauuuggcuuggauuuauugcaggauuaauugcaauugugauggugacaauuauguuauguuguaugacaucauguuguucuuguuuaaaaggauguuguucuuguggaagcuguuguugaugacucgagcugguacugcaugcacgcaaugcuagcugccccuuucccguccuggguaccccgagucucccccgaccucgggucccagguaugcucccaccuccaccugccccacucaccaccucugcuaguuccagacaccucccaagcacgcagcaaugcagcucaaaacgcuuagccuagccacacccccacgggaaacagcagugauuaaccuuuagcaauaaacgaaaguuuaacuaagcuauacuaaccccaggguuggucaauuucgugccagccacacccuggagcuagcaaaaaaaaaaaaaaaaaaaaaaaaaaaaaagcauaugacuaaaaaaaaaaaaaaaaaaaaaaaaaaaaaaaaaaaaaaaaaaaaaaaaaaaaaaaaaaaaaaaaaaaaaa

SEQ ID NO: 26945 - RNA, 1397 nt, Artificial Sequence
  SARS-CoV-2/Wuhan/WIV05/2019__EPI_ISL_402128 spike protein mRNA gc mod (1-19,327-528,1207-1254) Foldon construct
agauuaaacuaguauucuucugguccccacagacucagagagaacccgccaccauguuuguguuucuugugcugcugccucuugugucuucucagugugugaauuugacagugagauuuccaaauauuacaaaucuguguccauuuggagaaguguuuaaugcaacaagauuugcaucuguguaugcauggaauagaaaaagaauuucuaauuguguggcugauuauucugugcuguauaauagugcuucuuuuuccacauuuaaauguuauggagugucuccaacaaaauuaaaugauuuauguuuuacaaauguguaugcugauucuuuugugaucagaggugaugaagugagacagauugcccccggacagacaggaaaaauugcugauuacaauuacaaacugccugaugauuuuacaggaugugugauugcuuggaauucuaauaauuuagauucuaaagugggaggaaauuacaauuaucuguacagacuguuuagaaaaucaaaucugaaaccuuuugaaagagauauuucaacagaaauuuaucaggcuggaucaacaccuuguaauggaguggaaggauuuaauuguuauuuuccauuacagagcuauggauuucagccaaccaauggugugggauaucagccauauagagugguggugcugucuuuugaacugcugcaugcaccugcaacaguguguggaccuaaaggcucccccggcuccggcuccggaucugguuauauuccugaagcuccaagagaugggcaagcuuacguucguaaagauggcgaauggguauuacuuucuaccuuuuuaggaagcggcagcggaucugaacaguacauuaaauggccuugguacauuuggcuuggauuuauugcaggauuaauugcaauugugauggugacaauuauguuauguuguaugacaucauguuguucuuguuuaaaaggauguuguucuuguggaagcuguuguugaugacucgagcugguacugcaugcacgcaaugcuagcugccccuuucccguccuggguaccccgagucucccccgaccucgggucccagguaugcucccaccuccaccugccccacucaccaccucugcuaguuccagacaccucccaagcacgcagcaaugcagcucaaaacgcuuagccuagccacacccccacgggaaacagcagugauuaaccuuuagcaauaaacgaaaguuuaacuaagcuauacuaaccccaggguuggucaauuucgugccagccacacccuggagcuagcaaaaaaaaaaaaaaaaaaaaaaaaaaaaaagcauaugacuaaaaaaaaaaaaaaaaaaaaaaaaaaaaaaaaaaaaaaaaaaaaaaaaaaaaaaaaaaaaaaaaaaaaaa

SEQ ID NO: 26946 - RNA, 1701 nt, Artificial Sequence
  FLUAV/H3N2/A/Hong Kong/4801/2014__EPI643118 hemagglutinin CDS gc (HA)
augaagaccaucaucgcccugagcuacauccucugccugguguucgcccagaagauccccggcaacgacaacuccaccgcgacgcugugccucgggcaccacgccgucccgaacggcaccaucgugaagaccaucaccaacgaccgcaucgaggugacgaacgccaccgagcugguccagaacagcuccaucggggagaucugcgacagcccccaccagauccuggacggcgagaacugcacccucaucgacgcccugcugggggacccccagugcgacggcuuccagaacaagaagugggaccucuucguggagcgguccaaggccuacagcaacugcuaccccuacgacgugccggacuacgcgucccugcgcagccuggucgccuccagcggcacccucgaguucaacaacgaguccuucaacuggacgggggugacccagaacggcaccagcuccgccugcauccggcgcagcuccagcuccuucuucagccggcugaacuggcugacccaccucaacuacaaguaccccgcccugaacgugacgaugcccaacaacgagcaguucgacaagcuguacaucuggggcguccaccaccccgggaccgacaaggaccagaucuucccguacgcgcaguccagcgggcgcaucaucgugagcaccaagcggucccagcaggccgugauccccaacaucggcagccgcccccggauccgcgacaucccgucccggaucagcaucuacuggaccaucgucaagccgggcgacauccuccugaucaacuccacggggaaccugaucgccccgcgcggcuacuucaagcuccggagcgggaaguccagcaucaugcgcuccgacgcccccaucggcaagugcaagagcgagugcaucacccccaacggcuccaucccgaacgacaagcccuuccagaacgugaaccggaucaccuacggggccugcccccgcuacgugaagcacagcacccugaagcuggcgacgggcaugcggaacguccccgagaagcagacccgcgggaucuucggcgccaucgccggguucaucgagaacggcugggagggcaugguggacgggugguacggcuuccggcaccagaacuccgaggggcgcggccaggccgccgaccucaagagcacccaggcggccaucgaccagaucaacgggaagcugaaccggcugaucggcaagaccaacgagaaguuccaccagaucgagaaggaguucuccgagguggagggccgcauccaggaccucgagaaguacgucgaggacacgaagaucgaccuguggagcuacaacgccgagcugcucguggcccuggagaaccagcacaccaucgaccugaccgacuccgagaugaacaagcuguucgagaagaccaagaagcagcugcgcgagaacgccgaggacauggggaacggcugcuucaagaucuaccacaagugcgacaacgcgugcaucgggagcauccggaacggcacguacgaccacaacguguaccgcgacgaggcccugaacaaccgguuccagaucaagggggucgagcucaaguccggcuacaaggacuggauccuguggaucagcuucgccaucagcugcuuccugcucugcguggcccugcugggcuucaucaugugggccugccagaaggggaacauccgcugcaacaucugcaucuga

SEQ ID NO: 26947 - RNA, 1973 nt, Artificial Sequence
  FLUAV/H3N2/A/Hong Kong/4801/2014__EPI643118 hemagglutinin mRNA gc (HA)
aggagagucccgcagucggcguccagcggcucugcuuguucgugugugugucguugcaggccuuauucaagcuuaccaugaagaccaucaucgcccugagcuacauccucugccugguguucgcccagaagauccccggcaacgacaacuccaccgcgacgcugugccucgggcaccacgccgucccgaacggcaccaucgugaagaccaucaccaacgaccgcaucgaggugacgaacgccaccgagcugguccagaacagcuccaucggggagaucugcgacagcccccaccagauccuggacggcgagaacugcacccucaucgacgcccugcugggggacccccagugcgacggcuuccagaacaagaagugggaccucuucguggagcgguccaaggccuacagcaacugcuaccccuacgacgugccggacuacgcgucccugcgcagccuggucgccuccagcggcacccucgaguucaacaacgaguccuucaacuggacgggggugacccagaacggcaccagcuccgccugcauccggcgcagcuccagcuccuucuucagccggcugaacuggcugacccaccucaacuacaaguaccccgcccugaacgugacgaugcccaacaacgagcaguucgacaagcuguacaucuggggcguccaccaccccgggaccgacaaggaccagaucuucccguacgcgcaguccagcgggcgcaucaucgugagcaccaagcggucccagcaggccgugauccccaacaucggcagccgcccccggauccgcgacaucccgucccggaucagcaucuacuggaccaucgucaagccgggcgacauccuccugaucaacuccacggggaaccugaucgccccgcgcggcuacuucaagcuccggagcgggaaguccagcaucaugcgcuccgacgcccccaucggcaagugcaagagcgagugcaucacccccaacggcuccaucccgaacgacaagcccuuccagaacgugaaccggaucaccuacggggccugcccccgcuacgugaagcacagcacccugaagcuggcgacgggcaugcggaacguccccgagaagcagacccgcgggaucuucggcgccaucgccggguucaucgagaacggcugggagggcaugguggacgggugguacggcuuccggcaccagaacuccgaggggcgcggccaggccgccgaccucaagagcacccaggcggccaucgaccagaucaacgggaagcugaaccggcugaucggcaagaccaacgagaaguuccaccagaucgagaaggaguucuccgagguggagggccgcauccaggaccucgagaaguacgucgaggacacgaagaucgaccuguggagcuacaacgccgagcugcucguggcccuggagaaccagcacaccaucgaccugaccgacuccgagaugaacaagcuguucgagaagaccaagaagcagcugcgcgagaacgccgaggacauggggaacggcugcuucaagaucuaccacaagugcgacaacgcgugcaucgggagcauccggaacggcacguacgaccacaacguguaccgcgacgaggcccugaacaaccgguuccagaucaagggggucgagcucaaguccggcuacaaggacuggauccuguggaucagcuucgccaucagcugcuuccugcucugcguggcccugcugggcuucaucaugugggccugccagaaggggaacauccgcugcaacaucugcaucugaggacuagucccuguucccagagcccacuuuuuuuucuuuuuuugaaauaaaauagccugucuuucagaucucaaaggcucuuuucagagccaccaaaaaaaaaaaaaaaaaaaaaaaaaaaaaaaaaaaaaaaaaaaaaaaaaaaaaaaaaaaaaaaaaaaaaaaaaaaaaaaaaaaaaaaaaaaaaaaaaaaaa

SEQ ID NO: 26948 - RNA, 1918 nt, Artificial Sequence
  FLUAV/H3N2/A/Hong Kong/4801/2014__EPI643118 hemagglutinin mRNA gc (HA)
aggagaaagcuuaccaugaagaccaucaucgcccugagcuacauccucugccugguguucgcccagaagauccccggcaacgacaacuccaccgcgacgcugugccucgggcaccacgccgucccgaacggcaccaucgugaagaccaucaccaacgaccgcaucgaggugacgaacgccaccgagcugguccagaacagcuccaucggggagaucugcgacagcccccaccagauccuggacggcgagaacugcacccucaucgacgcccugcugggggacccccagugcgacggcuuccagaacaagaagugggaccucuucguggagcgguccaaggccuacagcaacugcuaccccuacgacgugccggacuacgcgucccugcgcagccuggucgccuccagcggcacccucgaguucaacaacgaguccuucaacuggacgggggugacccagaacggcaccagcuccgccugcauccggcgcagcuccagcuccuucuucagccggcugaacuggcugacccaccucaacuacaaguaccccgcccugaacgugacgaugcccaacaacgagcaguucgacaagcuguacaucuggggcguccaccaccccgggaccgacaaggaccagaucuucccguacgcgcaguccagcgggcgcaucaucgugagcaccaagcggucccagcaggccgugauccccaacaucggcagccgcccccggauccgcgacaucccgucccggaucagcaucuacuggaccaucgucaagccgggcgacauccuccugaucaacuccacggggaaccugaucgccccgcgcggcuacuucaagcuccggagcgggaaguccagcaucaugcgcuccgacgcccccaucggcaagugcaagagcgagugcaucacccccaacggcuccaucccgaacgacaagcccuuccagaacgugaaccggaucaccuacggggccugcccccgcuacgugaagcacagcacccugaagcuggcgacgggcaugcggaacguccccgagaagcagacccgcgggaucuucggcgccaucgccggguucaucgagaacggcugggagggcaugguggacgggugguacggcuuccggcaccagaacuccgaggggcgcggccaggccgccgaccucaagagcacccaggcggccaucgaccagaucaacgggaagcugaaccggcugaucggcaagaccaacgagaaguuccaccagaucgagaaggaguucuccgagguggagggccgcauccaggaccucgagaaguacgucgaggacacgaagaucgaccuguggagcuacaacgccgagcugcucguggcccuggagaaccagcacaccaucgaccugaccgacuccgagaugaacaagcuguucgagaagaccaagaagcagcugcgcgagaacgccgaggacauggggaacggcugcuucaagaucuaccacaagugcgacaacgcgugcaucgggagcauccggaacggcacguacgaccacaacguguaccgcgacgaggcccugaacaaccgguuccagaucaagggggucgagcucaaguccggcuacaaggacuggauccuguggaucagcuucgccaucagcugcuuccugcucugcguggcccugcugggcuucaucaugugggccugccagaaggggaacauccgcugcaacaucugcaucugaggacuaguuauaagacugacuagcccgaugggccucccaacgggcccuccuccccuccuugcaccgagauuaauaaaaaaaaaaaaaaaaaaaaaaaaaaaaaaaaaaaaaaaaaaaaaaaaaaaaaaaaaaaaaaaaugcaucccccccccccccccccccccccccccccccaaaggcucuuuucagagccaccagaauu

SEQ ID NO: 26949 - RNA, 1967 nt, Artificial Sequence
  FLUAV/H1N1/A/California/7/2009__ACP41953 hemagglutinin mRNA gc (HA) R8849
aggagagucccgcagucggcguccagcggcucugcuuguucgugugugugucguugcaggccuuauucaagcuuaccaugaaggccauccuggugguccuccuguacaccuucgccaccgcgaacgccgacacgcugugcaucggcuaccacgccaacaacagcaccgacaccguggacaccgugcucgagaagaacgucacggugacccacuccgugaaccugcuggaggacaagcacaacgggaagcucugcaagcugcggggcgucgccccgcugcaccucgggaagugcaacaucgccggcuggauccuggggaacccggagugcgagagccuguccaccgcgagcuccuggagcuacaucguggagacccccuccagcgacaacggcacgugcuaccccggcgacuucaucgacuacgaggagcuccgcgagcagcuguccagcguguccagcuucgagcgguucgagaucuuccccaagaccuccagcuggccgaaccacgacuccaacaagggggucaccgccgccugcccccacgccggcgccaagagcuucuacaagaaccugaucuggcucgugaagaaggggaacuccuaccccaagcugagcaaguccuacaucaacgacaagggcaaggaggugcugguccucugggggauccaccaccccagcaccagcgcggaccagcagucccuguaccagaacgccgacgccuacguguucgugggcagcucccgcuacagcaagaaguucaagccggagaucgccauccggcccaagguccgcgaccaggagggccgcaugaacuacuacuggacccugguggagcccggggacaagaucaccuucgaggcgaccggcaaccucguggucccccgguacgccuucgccauggagcgcaacgccggguccggcaucaucaucagcgacacgccggugcacgacugcaacacgaccugccagacccccaagggcgccaucaacaccucccugcccuuccagaacauccaccccaucaccaucgggaagugcccgaaguacgucaagagcaccaagcugcggcucgcgaccggccugcgcaacauccccuccauccagagccgggggcuguucggcgccaucgccggguucaucgagggcggcuggacggggaugguggacggcugguacggguaccaccaccagaacgagcagggcagcggguacgccgccgaccucaaguccacgcagaacgcgaucgacgagaucaccaacaaggugaacagcgucaucgagaagaugaacacccaguucaccgccgugggcaaggaguucaaccaccuggagaagcggaucgagaaccugaacaagaaggucgacgacggcuuccucgacaucuggacguacaacgccgagcugcuggugcuccuggagaacgagcgcacccuggacuaccacgacuccaacgugaagaaccucuacgagaagguccggagccagcugaagaacaacgccaaggagaucgggaacggcugcuucgaguucuaccacaagugcgacaacacgugcauggaguccgugaagaacgggaccuacgacuaccccaaguacagcgaggaggccaagcugaaccgcgaggagaucgacggcgugaagcucgaguccacccggaucuaccagauccuggcgaucuacagcaccgucgccagcucccuggugcucguggucagccugggggccaucuccuucuggaugugcagcaacggcucccugcagugccgcaucugcaucugaggacuagucccuguucccagagcccacuuuuuuuucuuuuuuugaaauaaaauagccugucuuuccaaaggcucuuuucagagccaccaaaaaaaaaaaaaaaaaaaaaaaaaaaaaaaaaaaaaaaaaaaaaaaaaaaaaaaaaaaaaaaaaaaaaaaaaaaaaaaaaaaaaaaaaaaaaaaaaaaaa

SEQ ID NO: 26950 - RNA, 1967 nt, Artificial Sequence
  FLUAV/H3N2/A/Hong Kong/4801/2014__EPI643118 hemagglutinin mRNA gc (HA) R8853
aggagagucccgcagucggcguccagcggcucugcuuguucgugugugugucguugcaggccuuauucaagcuuaccaugaagaccaucaucgcccugagcuacauccucugccugguguucgcccagaagauccccggcaacgacaacuccaccgcgacgcugugccucgggcaccacgccgucccgaacggcaccaucgugaagaccaucaccaacgaccgcaucgaggugacgaacgccaccgagcugguccagaacagcuccaucggggagaucugcgacagcccccaccagauccuggacggcgagaacugcacccucaucgacgcccugcugggggacccccagugcgacggcuuccagaacaagaagugggaccucuucguggagcgguccaaggccuacagcaacugcuaccccuacgacgugccggacuacgcgucccugcgcagccuggucgccuccagcggcacccucgaguucaacaacgaguccuucaacuggacgggggugacccagaacggcaccagcuccgccugcauccggcgcagcuccagcuccuucuucagccggcugaacuggcugacccaccucaacuacaaguaccccgcccugaacgugacgaugcccaacaacgagcaguucgacaagcuguacaucuggggcguccaccaccccgggaccgacaaggaccagaucuucccguacgcgcaguccagcgggcgcaucaucgugagcaccaagcggucccagcaggccgugauccccaacaucggcagccgcccccggauccgcgacaucccgucccggaucagcaucuacuggaccaucgucaagccgggcgacauccuccugaucaacuccacggggaaccugaucgccccgcgcggcuacuucaagcuccggagcgggaaguccagcaucaugcgcuccgacgcccccaucggcaagugcaagagcgagugcaucacccccaacggcuccaucccgaacgacaagcccuuccagaacgugaaccggaucaccuacggggccugcccccgcuacgugaagcacagcacccugaagcuggcgacgggcaugcggaacguccccgagaagcagacccgcgggaucuucggcgccaucgccggguucaucgagaacggcugggagggcaugguggacgggugguacggcuuccggcaccagaacuccgaggggcgcggccaggccgccgaccucaagagcacccaggcggccaucgaccagaucaacgggaagcugaaccggcugaucggcaagaccaacgagaaguuccaccagaucgagaaggaguucuccgagguggagggccgcauccaggaccucgagaaguacgucgaggacacgaagaucgaccuguggagcuacaacgccgagcugcucguggcccuggagaaccagcacaccaucgaccugaccgacuccgagaugaacaagcuguucgagaagaccaagaagcagcugcgcgagaacgccgaggacauggggaacggcugcuucaagaucuaccacaagugcgacaacgcgugcaucgggagcauccggaacggcacguacgaccacaacguguaccgcgacgaggcccugaacaaccgguuccagaucaagggggucgagcucaaguccggcuacaaggacuggauccuguggaucagcuucgccaucagcugcuuccugcucugcguggcccugcugggcuucaucaugugggccugccagaaggggaacauccgcugcaacaucugcaucugaggacuagucccuguucccagagcccacuuuuuuuucuuuuuuugaaauaaaauagccugucuuuccaaaggcucuuuucagagccaccaaaaaaaaaaaaaaaaaaaaaaaaaaaaaaaaaaaaaaaaaaaaaaaaaaaaaaaaaaaaaaaaaaaaaaaaaaaaaaaaaaaaaaaaaaaaaaaaaaaaa

SEQ ID NO: 26951 - RNA, 2024 nt, Artificial Sequence
  FLUBV/H0N0/B/Brisbane/60/2008__FJ766840 hemagglutinin mRNA gc (HA) R8852
aggagagucccgcagucggcguccagcggcucugcuuguucgugugugugucguugcaggccuuauucaagcuuaccaugaaggccaucaucgugcugcucauggucgugaccagcaacgccgaccggaucugcaccggcaucacguccagcaacuccccgcacguggucaagaccgcgacccagggggaggugaacgugaccggcgucaucccgcugacgaccacccccaccaagagccacuucgccaaccugaaagggacggagacccgcggcaagcucugccccaagugccugaacugcaccgaccuggacguggcccucgggcggcccaagugcaccggcaaaaucccguccgcccgcgugagcauccugcacgagguccggcccgugacguccggcugcuuccccaucaugcacgaccgcaccaagauccggcagcugcccaaccuccugcgcggguacgagcacauccggcugagcacccacaacgugaucaacgccgagaacgcgccgggcgggcccuacaagaucggcaccuccgggagcugccccaacaucacgaacggcaacggcuucuucgccaccauggccugggccguccccaagaacgacaagaacaaaaccgcgaccaacccgcucacgaucgaggugcccuacaucugcaccgagggggaggaccagaucaccguguggggcuuccacuccgacaacgagacccagauggccaagcuguacggggacagcaagccccagaaguucacguccagcgccaacggcgucaccacccacuacgugucccagaucggcggguuccccaaccagaccgaggacggcgggcugccgcagagcggccgcaucguggucgacuacauggugcagaaauccgggaagacgggcaccaucaccuaccagcggggcauccuccugccccagaagguguggugcgccagcgggcgcuccaaggucaucaaaggcagccugccccucaucggggaggccgacugccugcacgagaaguacggcgggcugaacaagagcaagcccuacuacaccggcgagcacgcgaaagccaucggcaacugcccgaucugggugaagacgccccucaagcuggccaacgggaccaaguaccggccgcccgccaaacugcucaaggagcgcggcuucuucggggccaucgcgggcuuccuggagggcgggugggagggcaugaucgccggguggcacggcuacaccucccacggggcccacggcguggccgucgccgcggaccucaagagcacccaggaggccaucaacaaaaucacgaagaaccugaacucccugagcgagcuggaggugaagaaccuccagcggcuguccggcgccauggacgagcugcacaacgagauccucgagcuggacgagaaggucgacgaccugcgcgccgacaccaucagcucccagaucgagcucgccgugcugcugagcaacgaggggaucaucaacuccgaggacgagcaccuccuggcgcuggagcggaaacucaagaagaugcugggccccagcgccguggagaucgggaacggcugcuucgagaccaagcacaagugcaaccagaccugccuggaccgcaucgccgccgggaccuucgacgcgggcgaguucucccuccccacguucgacagccugaacaucaccgccgccucccugaacgacgacggccuggacaaccacaccauccuccuguacuacagcaccgccgccuccagccuggcggucacgcucaugaucgccaucuucgugguguacauggucucccgggacaacgugagcugcuccaucugccugugaggacuagucccuguucccagagcccacuuuuuuuucuuuuuuugaaauaaaauagccugucuuuccaaaggcucuuuucagagccaccaaaaaaaaaaaaaaaaaaaaaaaaaaaaaaaaaaaaaaaaaaaaaaaaaaaaaaaaaaaaaaaaaaaaaaaaaaaaaaaaaaaaaaaaaaaaaaaaaaaaa

SEQ ID NO: 26952 - RNA, 2021 nt, Artificial Sequence
  FLUBV/H0N0/B/Phuket/3073/2013__EPI540671 hemagglutinin mRNA gc (HA) R8854
aggagagucccgcagucggcguccagcggcucugcuuguucgugugugugucguugcaggccuuauucaagcuuaccaugaaggccaucaucgugcugcucauggucgugaccagcaacgccgaccgcaucugcaccggcaucacguccagcaacuccccgcacguggucaagaccgcgacccagggggaggugaacgugaccggcgucaucccccugacgaccacccccaccaagagcuacuucgccaaccugaaggggacgcggacccgcggcaaacucugccccgacugccugaacugcaccgaccuggacguggcccucgggcggcccaugugcgugggcaccacgccguccgccaaggccagcauccugcacgagguccgccccgugaccuccggcugcuuccccaucaugcacgaccggaccaagauccgccagcugcccaaccuccugcggggguacgagaagauccgccugagcacccagaacgugaucgacgcggagaaagccccgggcgggcccuaccggcucggcacguccgggagcugccccaacgccaccuccaagaucggcuucuucgccaccauggcgugggccguccccaaggacaacuacaagaacgccaccaacccgcugacgguggaggugcccuacaucugcaccgagggcgaggaccagaucaccgucuggggguuccacagcgacaacaagacccagaugaaaucccuguacggcgacagcaacccccagaaguucacguccagcgccaacggggugaccacccacuacgugucccagaucggcgacuuccccgaccagaccgaggacggcgggcucccgcagagcggccgcaucgucguggacuacaugaugcagaagcccgggaagacgggcaccaucguguaccagcggggcguccugcugccccagaaaguguggugcgccuccgggcgcagcaaggugaucaagggcagccucccccugaucggggaggcggacugccugcacgaggaguacggcgggcucaacaaguccaaaccguacuacaccggcaagcacgccaaggccaucgggaacugccccaucugggucaagaccccgcugaaacuggccaacggcacgaaauaccggcccccggccaagcuccugaaggagcgcggcuucuucggggcgaucgccggcuuccuggagggcgggugggaggggaugaucgccggcuggcacggcuacaccagccacggggcccacggcguggccgucgcggccgaccucaaguccacccaggaggccaucaacaaaaucaccaagaaccugaacagccuguccgagcucgaggugaagaaccugcagcggcugagcggggccauggacgagcuccacaacgagauccuggagcuggacgagaagguggacgaccuccgcgccgacacgaucuccagccagaucgagcuggcgguccugcucuccaacgagggcaucaucaacagcgaggacgagcaccuccuggcccucgagcggaaacugaagaagaugcugggccccuccgccguggacaucgggaacggcugcuucgagaccaagcacaagugcaaccagaccugccucgaccgcaucgccgcggggaccuucaacgccggcgaguucagccugcccaccuucgacucccugaacaucacggccgccagccugaacgacgacgggcucgacaaccacaccauccugcuguacuacuccaccgccgcgagcucccucgccgugacccugaugcuggccaucuucaucgucuacauggugagccgggacaacguguccugcagcaucugccucugaggacuagucccuguucccagagcccacuuuuuuuucuuuuuuugaaauaaaauagccugucuuuccaaaggcucuuuucagagccaccaaaaaaaaaaaaaaaaaaaaaaaaaaaaaaaaaaaaaaaaaaaaaaaaaaaaaaaaaaaaaaaaaaaaaaaaaaaaaaaaaaaaaaaaaaaaaaaaaaaaa

SEQ ID NO: 26953 - RNA, 1676 nt, Artificial Sequence
  FLUAV/H1N1/A/California/7/2009__GQ906802 neuraminidase mRNA gc (NA) R8858
aggagagucccgcagucggcguccagcggcucugcuuguucgugugugugucguugcaggccuuauucaagcuuaccaugaaccccaaccagaagaucaucaccaucggcuccgugugcaugaccaucgggauggccaaccugauccuccagaucggcaacaucaucuccaucuggaucucccacuccauccagcuggggaaccagaaccagaucgagacgugcaaccaguccgucaucaccuacgagaacaacaccugggugaaccagaccuacgugaacaucuccaacacgaacuucgccgcgggccaguccgucguguccgugaagcuggccgggaacagcucccucugcccggucuccggcugggccaucuacuccaaggacaacuccgugcggaucggcuccaagggggacgucuucgugauccgcgagccguucaucuccugcuccccccuggagugccggaccuucuuccugacccagggcgcccuccugaacgacaagcacuccaacgggaccaucaaggaccgcucccccuaccggacgcugauguccugcccgaucggcgaggugcccucccccuacaacucccgcuucgaguccgucgccugguccgcguccgccugccacgacgggaucaacuggcucaccaucggcaucuccggccccgacaacggggccguggccgugcugaaguacaacggcaucaucaccgacaccaucaaguccuggcggaacaacauccugcgcacgcaggaguccgagugcgcgugcgucaacggguccugcuucaccgugaugaccgacggcccguccaacggccaggccuccuacaagaucuuccggaucgagaaggggaagaucgugaaguccgucgagaugaacgcccccaacuaccacuacgaggagugcuccugcuaccccgacuccuccgagaucaccugcgugugccgcgacaacuggcacggcuccaaccggcccuggguguccuucaaccagaaccucgaguaccagaucggguacaucugcuccggcaucuucggggacaacccgcgccccaacgacaagacgggcuccugcggccccgucuccagcaacggggccaacggcgugaagggguucuccuucaaguacggcaacgggguguggaucggccggaccaaguccaucuccucccgcaacggcuucgagaugaucugggaccccaacggguggaccggcaccgacaacaacuucuccaucaagcaggacaucgucgggaucaacgagugguccggcuacuccggguccuucgugcagcacccggagcugacgggccuggacugcauccggcccugcuucuggguggagcucauccgcggccggcccaaggagaacaccaucuggaccuccggguccuccaucuccuucugcggcgucaacuccgacaccguggggugguccuggcccgacggcgccgagcugccguucacgaucgacaagugaggacuagucccuguucccagagcccacuuuuuuuucuuuuuuugaaauaaaauagccugucuuuccaaaggcucuuuucagagccaccaaaaaaaaaaaaaaaaaaaaaaaaaaaaaaaaaaaaaaaaaaaaaaaaaaaaaaaaaaaaaaaaaaaaaaaaaaaaaaaaaaaaaaaaaaaaaaaaaaaaa

SEQ ID NO: 26954 - RNA, 1676 nt, Artificial Sequence
  FLUAV/H3N2/A/Hong Kong/4801/2014__EPI578429 neuraminidase mRNA gc (NA) R8856
aggagagucccgcagucggcguccagcggcucugcuuguucgugugugugucguugcaggccuuauucaagcuuaccaugaaccccaaccagaagaucaucaccaucggcuccgugucccugaccaucuccacgaucugcuucuucaugcagaucgccauccucaucaccaccgucacccugcacuucaagcaguacgaguucaacuccccgcccaacaaccaggugaugcugugcgagcccacgaucaucgagcgcaacaucaccgagaucguguaccucaccaacaccacgaucgagaaggagaucugccccaagccggccgaguaccggaacugguccaagccccagugcgggaucaccggcuucgcgcccuucuccaaggacaacuccauccgccuguccgccgggggcgacaucugggucacccgggagcccuacguguccugcgacccggacaagugcuaccaguucgcccuggggcagggcaccacgcucaacaacgugcacuccaacaacaccguccgcgaccggacccccuaccgcacccugcugaugaacgagcucggcgugcccuuccaccuggggacgaagcaggucugcaucgccugguccuccagcuccugccacgacggcaaggccuggcugcacgucugcaucaccggggacgacaagaacgcgaccgccuccuucaucuacaacggccggcucguggacuccguggucagcugguccaaggacauccugcgcacccaggaguccgagugcaucugcaucaacgggacgugcaccguggugaugaccgacggcuccgccuccggcaaggccgacaccaagauccuguucaucgaggaggggaagaucguccacacguccacccucuccggcuccgcgcagcacguggaggagugcuccugcuacccccgguacccgggggugcgcugcgucugccgggacaacuggaagggcuccaaccgcccgaucguggacaucaacaucaaggaccacuccaucgugagcuccuacgucugcuccggccuggugggggacaccccgcggaagaacgacuccagcuccagcucccacugccuggaccccaacaacgaggagggcgggcacggcgugaaggggugggccuucgacgacggcaacgacgucuggaugggccgcaccaucaacgagacgucccggcucggguacgagaccuucaaggugaucgagggcugguccaacccgaaguccaagcugcagaccaaccgccaggucaucguggaccggggcgaccgcuccggguacuccgggaucuucuccguggagggcaaguccugcaucaaccggugcuucuacgucgagcugauccgcggccggaaggaggagaccgaggugcucuggacgagcaacuccaucguggucuucugcgggaccagcggcaccuacgggaccggcuccuggcccgacggggccgaccugaaccugaugcccaucugaggacuagucccuguucccagagcccacuuuuuuuucuuuuuuugaaauaaaauagccugucuuuccaaaggcucuuuucagagccaccaaaaaaaaaaaaaaaaaaaaaaaaaaaaaaaaaaaaaaaaaaaaaaaaaaaaaaaaaaaaaaaaaaaaaaaaaaaaaaaaaaaaaaaaaaaaaaaaaaaaa

SEQ ID NO: 26955 - RNA, 1667 nt, Artificial Sequence
  FLUBV/H0N0/B/Brisbane/60/2008__EPI173278 neuraminidase mRNA gc (NA) R8860
aggagagucccgcagucggcguccagcggcucugcuuguucgugugugugucguugcaggccuuauucaagcuuaccaugcugcccagcaccauccagacccucacgcuguuccugaccuccggcggggugcuccugagccuguacgucuccgccagccucuccuaccugcuguacagcgacauccuccugaaguucuccccgaccgagaucaccgcccccacgaugccccuggacugcgcgaacgccagcaacgugcaggccgugaaccgcuccgccaccaagggcgucacccuccugcugcccgagccggaguggaccuacccccggcucagcugccccggguccacguuccagaaggcccugcugaucagcccccaccgcuucggcgagaccaaggggaacuccgcgccgcucaucauccgggagcccuucaucgccugcggccccaacgagugcaagcacuucgcccugacccacuacgccgcgcagcccggcggguacuacaacggcacccgcggggaccggaacaagcugcgccaccucaucagcgugaagcugggcaagaucccgacgguggagaacuccaucuuccacauggccgccuggagcggguccgccugccacgacggcaaggaguggaccuacaucggcgucgacgggcccgacaacaacgcccugcucaaggugaaguacggcgaggcguacaccgacaccuaccacagcuacgccaacaagauccugcggacgcaggaguccgccugcaacugcaucgggggcaacugcuaccugaugaucaccgacggcagcgccagcgggguguccgagugccgcuuccucaagauccgggagggccgcaucaucaaggagaucuuccccaccgggcgggucaagcacaccgaggagugcacgugcggcuucgccagcaacaagaccaucgagugcgcgugccgcgacaacuccuacaccgccaagcggcccuucgugaagcugaacguggagaccgacacggccgagauccgccugaugugcaccgacaccuaccucgacaccccgcggcccaacgacgggagcaucacgggccccugcgaguccaacggcgacaaggggagcggcgggaucaagggcggguucguccaccagcgcauggaguccaagaucggccggugguacagccgcaccauguccaagaccgagcggaugggcauggggcuguacgugaaguacgacggcgaccccugggccgacagcgacgcccuggcguucuccggggugauggucagcaugaaggagccgggcugguacuccuucggguucgagaucaaggacaagaagugcgacgugcccugcaucggcaucgagauggugcacgacggcgggaaggagaccuggcacagcgccgccacggccaucuacugccucaugggcuccgggcagcugcugugggacaccgucaccggcguggacauggcccucugaggacuagucccuguucccagagcccacuuuuuuuucuuuuuuugaaauaaaauagccugucuuuccaaaggcucuuuucagagccaccaaaaaaaaaaaaaaaaaaaaaaaaaaaaaaaaaaaaaaaaaaaaaaaaaaaaaaaaaaaaaaaaaaaaaaaaaaaaaaaaaaaaaaaaaaaaaaaaaaaaa

SEQ ID NO: 26956 - protein, 539 aa, Artificial Sequence
  HPIV3/USA/629-D01959/2007__AGW51052.1 fusion glycoprotein (F0)
MLISILSIITTMIMASHCQIDITKLQHVGVLVNSPKGMKISQNFETRYLILSLIPKIEDSNSCGDQQIKQYKRLLDRLIIPLYDGLKLQKDVIVTNQESNENTDPRTERFFGGVIGTIALGVATSAQITAAVALVEAKQAKSDIEKLKEAIRDTNKAVQSVQSSVGNLIVAIKSVQDYVNKEIVPSIARLGCEAAGLQLGIALTQHYSELTNIFGDNIGSLQEKGIKLQGIASLYRTNITEIFTTSTVDKYDIYDLLFTESIKVRVIDVDLNDYSITLQVRLPLLTRLLNTQIYKVDSISYNIQNREWYIPLPSHIMTKGAFLGGADVKECIEAFSSYICPSDPGFVLNHEMESCLSGNISQCPRTTVTSDIVPRYAFVNGGVVANCITTTCTCNGIGNRINQPPDQGVKIITHKECNTIGINGMLFNTNKEGTLAFYTPDDITLNNSVALDPIDISIELNKAKSDLEESKEWIRRSNQKLDSIGSWHQSSTTIIIILIMMIILFIINITIITIAIKYYRIQKRNRVDQNDKPYVLTNK

SEQ ID NO: 26957 - protein, 539 aa, Artificial Sequence
  HPIV3/USA/629-D01959/2007__AGW51052.1 fusion glycoprotein (variant)
MLISILSIITTMIMASHCQIDITKLQHVGVLVNSPKGMKISQNFETRYLILSLIPKIEDSNSCGDQQIKQYKRLLDRLIIPLYDGLKLQKDVIVTNQESNENTDPRTERFFGGVIGTIALGVATSAQITAAVALVEAKQAKSDIEKLKEAIRDTNKAVQSVCSSVGNCIVAIKSVQDYVNKEIVPSIARLGCEAAGLQLGIALTQHYSELTNCFGDNIGSLQEKGIKLQCIASLYRTNITEIFTTSTVDKYDIYDLLFTESIKVRVIDVDLNDYSITLQVRLPLLTRLLNTQIYKVDSISYNIQNREWYIPLPSHIMTKGAFLGGADVKECIEAFSSYICPSDPGFVLNHEMESCLSGNISQCPRTTVTSDIVPRYAFVNGGVVANCITTTCTCNGIGNRINQPPDQGVKIITHKECNTIGINGMLFNTNKEGTLAFYTPDDITLNNSVALDPIDISIELNKVKSDLEESKEWYRRSNQKLDSIGSWHQSSTTIIIILIMMIILFIINITIITIAIKYYRIQKRNRVDQNDKPYVLTNK

SEQ ID NO: 26958 - RNA, 1620 nt, Artificial Sequence
  HPIV3/USA/629-D01959/2007__AGW51052.1 fusion glycoprotein CDS gc (F0)
augcugaucagcauccucuccaucaucaccaccaugaucauggccagccacugccagaucgacaucaccaagcugcagcacgugggcguccucgugaacagccccaaggggaugaagaucucccagaacuucgagacccgcuaccugauccugagccucaucccgaagaucgaggacuccaacagcugcggcgaccagcagaucaagcaguacaagcggcugcuggaccgccucaucaucccccuguacgacgggcugaagcuccagaaggacgugaucgucacgaaccaggaguccaacgagaacaccgacccccggaccgagcgcuucuucggcggggugaucggcaccaucgcccugggcguggccacgagcgcgcagaucaccgccgccgucgcccugguggaggccaagcaggcgaaguccgacaucgagaagcucaaggaggccauccgggacaccaacaaggccgugcagagcguccaguccagcguggggaaccugaucguggccaucaaguccguccaggacuacgugaacaaggagaucgugcccagcaucgcgcgccugggcugcgaggccgccgggcuccagcugggcaucgcccugacccagcacuacuccgagcucacgaacaucuucggggacaacaucggcagccugcaggagaagggcaucaagcugcaggggaucgccucccucuaccggaccaacaucaccgagaucuucaccacgagcaccgucgacaaguacgacaucuacgaccugcuguucaccgaguccaucaaggugcgcgugaucgacgucgaccucaacgacuacagcaucacccuccaggugcggcugccgcugcugacgcgccugcucaacacccagaucuacaagguggacuccaucagcuacaacauccagaaccgggagugguacaucccccugcccagccacaucaugaccaagggcgcguuccuggggggcgccgacgucaaggagugcaucgaggccuucuccagcuacaucugccccuccgacccgggcuucgugcucaaccacgagauggagagcugccuguccgggaacaucagccagugcccccgcaccacggugaccuccgacaucgucccccgguacgccuucgugaacggcggggucguggccaacugcaucaccaccacgugcacgugcaacggcaucgggaaccgcaucaaccagcccccggaccagggcgugaagaucaucacccacaaggagugcaacaccaucggcaucaacgggaugcuguucaacaccaacaaggagggcacccucgcguucuacacccccgacgacaucacccugaacaacagcgucgcccuggaccccaucgacaucuccaucgagcucaacaaggccaagagcgaccuggaggaguccaaggaguggauccggcgcagcaaccagaagcuggacuccaucgggagcuggcaccaguccagcacgaccaucaucaucauccucaucaugaugaucauccuguucaucaucaacaucaccaucaucaccaucgccaucaaguacuaccggauccagaagcgcaaccggguggaccagaacgacaagcccuacgugcugacgaacaaguga

SEQ ID NO: 26959 - RNA, 1620 nt, Artificial Sequence
  HPIV3/USA/629-D01959/2007__AGW51052.1 fusion glycoprotein CDS gc (variant)
augcugaucagcauccucuccaucaucaccaccaugaucauggccagccacugccagaucgacaucaccaagcugcagcacgugggcguccucgugaacagccccaaggggaugaagaucucccagaacuucgagacccgcuaccugauccugagccucaucccgaagaucgaggacuccaacagcugcggcgaccagcagaucaagcaguacaagcggcugcuggaccgccucaucaucccccuguacgacgggcugaagcuccagaaggacgugaucgucacgaaccaggaguccaacgagaacaccgacccccggaccgagcgcuucuucggcggggugaucggcaccaucgcccugggcguggccacgagcgcgcagaucaccgccgccgucgcccugguggaggccaagcaggcgaaguccgacaucgagaagcucaaggaggccauccgggacaccaacaaggccgugcagagcgucugcuccagcguggggaacugcaucguggccaucaaguccguccaggacuacgugaacaaggagaucgugcccagcaucgcgcgccugggcugcgaggccgccgggcuccagcugggcaucgcccugacccagcacuacuccgagcucacgaacugcuucggggacaacaucggcagccugcaggagaagggcaucaagcugcagugcaucgccucccucuaccggaccaacaucaccgagaucuucaccacgagcaccgucgacaaguacgacaucuacgaccugcuguucaccgaguccaucaaggugcgcgugaucgacgucgaccucaacgacuacagcaucacccuccaggugcggcugccgcugcugacgcgccugcucaacacccagaucuacaagguggacuccaucagcuacaacauccagaaccgggagugguacaucccccugcccagccacaucaugaccaagggcgcguuccuggggggcgccgacgucaaggagugcaucgaggccuucuccagcuacaucugccccuccgacccgggcuucgugcucaaccacgagauggagagcugccuguccgggaacaucagccagugcccccgcaccacggugaccuccgacaucgucccccgguacgccuucgugaacggcggggucguggccaacugcaucaccaccacgugcacgugcaacggcaucgggaaccgcaucaaccagcccccggaccagggcgugaagaucaucacccacaaggagugcaacaccaucggcaucaacgggaugcuguucaacaccaacaaggagggcacccucgcguucuacacccccgacgacaucacccugaacaacagcgucgcccuggaccccaucgacaucuccaucgagcucaacaaggucaagagcgaccuggaggaguccaaggagugguaccggcgcagcaaccagaagcuggacuccaucgggagcuggcaccaguccagcacgaccaucaucaucauccucaucaugaugaucauccuguucaucaucaacaucaccaucaucaccaucgccaucaaguacuaccggauccagaagcgcaaccggguggaccagaacgacaagcccuacgugcugacgaacaaguga

SEQ ID NO: 26960 - RNA, 1617 nt, Artificial Sequence
  HPIV3/Homo sapiens/PER/FLA4571/2008__AHX22069.1 fusion glycoprotein CDS gc (F0)
augcccaucagcauccugcugaucaucaccacaaugaucauggccagccacugccagaucgacaucaccaagcugcagcacgugggcgugcucgugaacagccccaagggcaugaagaucagccagaacuucgagacacgcuaccugauccugagccugauccccaagaucgaggacagcaacagcugcggcgaccagcagaucaagcaguacaagcggcugcuggacagacugaucaucccccuguacgacggccugcggcugcagaaagacgugaucgugaccaaccaggaaagcaacgagaacaccgacccccggaccgagagauucuucggcggcgugaucggcacaaucgcccugggaguggccacaagcgcccagauuacagccgcuguggcccugguggaagccaagcaggccagaagcgacaucgagaagcugaaagaggccauccgggacaccaacaaggccgugcagagcgugcaguccagcgugggcaaucugaucguggccaucaaguccgugcaggacuacgugaacaaagaaaucgugcccucuaucgcccggcugggcugugaagcugccggacugcagcugggcauugcccugacacagcacuacagcgagcugaccaacaucuucggcgacaacaucggcagccugcaggaaaagggcauuaagcugcagggaaucgccagccuguaccgcaccaacaucaccgagaucuucaccaccagcaccguggauaaguacgacaucuacgaccugcuguucaccgagagcaucaaagugcgcgugaucgacguggaccugaacgacuacagcaucacccugcaagugcggcugccccugcugaccagacugcugaacacccagaucuacaagguggacagcaucuccuacaacauccagaaccgcgagugguacaucccucugcccagccacauuaugaccaagggcgccuuucugggcggagccgacgugaaagagugcaucgaggccuucagcagcuacaucugccccagcgacccuggcuucgugcugaaccacgagauggaaagcugccugagcggcaacaucagccagugccccagaaccaccgugaccuccgacaucgugcccagauacgccuucgugaauggcggcgugguggccaacugcaucaccaccaccuguaccugcaacggcaucggcaaccggaucaaccagccucccgaucagggcgugaagauuaucacccacaaagaguguaacaccaucggcaucaacggcaugcuguucaauaccaacaaagagggcacccuggccuucuacacccccgacgauaucacccugaacaacuccguggcucuggaccccaucgacaucuccaucgagcugaacaaggccaagagcgaccuggaagaguccaaagaguggauccggcggagcaaccagaagcuggacucuaucggcagcuggcaccagagcagcaccaccaucaucgugauccugauuaugaugauuauccuguucaucaucaacauuaccaucaucacuaucgccauuaaguacuaccggauccagaaacggaaccggguggaccagaaugacaagcccuacgugcugacaaacaag

SEQ ID NO: 26961 - RNA, 1892 nt, Artificial Sequence
  HPIV3/USA/629-D01959/2007__AGW51052.1 fusion glycoprotein mRNA gc (F0) R10330
aggagagucccgcagucggcguccagcggcucugcuuguucgugugugugucguugcaggccuuauucaagcuuaccaugcugaucagcauccucuccaucaucaccaccaugaucauggccagccacugccagaucgacaucaccaagcugcagcacgugggcguccucgugaacagccccaaggggaugaagaucucccagaacuucgagacccgcuaccugauccugagccucaucccgaagaucgaggacuccaacagcugcggcgaccagcagaucaagcaguacaagcggcugcuggaccgccucaucaucccccuguacgacgggcugaagcuccagaaggacgugaucgucacgaaccaggaguccaacgagaacaccgacccccggaccgagcgcuucuucggcggggugaucggcaccaucgcccugggcguggccacgagcgcgcagaucaccgccgccgucgcccugguggaggccaagcaggcgaaguccgacaucgagaagcucaaggaggccauccgggacaccaacaaggccgugcagagcguccaguccagcguggggaaccugaucguggccaucaaguccguccaggacuacgugaacaaggagaucgugcccagcaucgcgcgccugggcugcgaggccgccgggcuccagcugggcaucgcccugacccagcacuacuccgagcucacgaacaucuucggggacaacaucggcagccugcaggagaagggcaucaagcugcaggggaucgccucccucuaccggaccaacaucaccgagaucuucaccacgagcaccgucgacaaguacgacaucuacgaccugcuguucaccgaguccaucaaggugcgcgugaucgacgucgaccucaacgacuacagcaucacccuccaggugcggcugccgcugcugacgcgccugcucaacacccagaucuacaagguggacuccaucagcuacaacauccagaaccgggagugguacaucccccugcccagccacaucaugaccaagggcgcguuccuggggggcgccgacgucaaggagugcaucgaggccuucuccagcuacaucugccccuccgacccgggcuucgugcucaaccacgagauggagagcugccuguccgggaacaucagccagugcccccgcaccacggugaccuccgacaucgucccccgguacgccuucgugaacggcggggucguggccaacugcaucaccaccacgugcacgugcaacggcaucgggaaccgcaucaaccagcccccggaccagggcgugaagaucaucacccacaaggagugcaacaccaucggcaucaacgggaugcuguucaacaccaacaaggagggcacccucgcguucuacacccccgacgacaucacccugaacaacagcgucgcccuggaccccaucgacaucuccaucgagcucaacaaggccaagagcgaccuggaggaguccaaggaguggauccggcgcagcaaccagaagcuggacuccaucgggagcuggcaccaguccagcacgaccaucaucaucauccucaucaugaugaucauccuguucaucaucaacaucaccaucaucaccaucgccaucaaguacuaccggauccagaagcgcaaccggguggaccagaacgacaagcccuacgugcugacgaacaagugaggacuagucccuguucccagagcccacuuuuuuuucuuuuuuugaaauaaaauagccugucuuucagaucucaaaggcucuuuucagagccaccaaaaaaaaaaaaaaaaaaaaaaaaaaaaaaaaaaaaaaaaaaaaaaaaaaaaaaaaaaaaaaaaaaaaaaaaaaaaaaaaaaaaaaaaaaaaaaaaaaaaa

SEQ ID NO: 26962 - RNA, 1892 nt, Artificial Sequence
  HPIV3/USA/629-D01959/2007__AGW51052.1 fusion glycoprotein mRNA gc (variant) R10331
aggagagucccgcagucggcguccagcggcucugcuuguucgugugugugucguugcaggccuuauucaagcuuaccaugcugaucagcauccucuccaucaucaccaccaugaucauggccagccacugccagaucgacaucaccaagcugcagcacgugggcguccucgugaacagccccaaggggaugaagaucucccagaacuucgagacccgcuaccugauccugagccucaucccgaagaucgaggacuccaacagcugcggcgaccagcagaucaagcaguacaagcggcugcuggaccgccucaucaucccccuguacgacgggcugaagcuccagaaggacgugaucgucacgaaccaggaguccaacgagaacaccgacccccggaccgagcgcuucuucggcggggugaucggcaccaucgcccugggcguggccacgagcgcgcagaucaccgccgccgucgcccugguggaggccaagcaggcgaaguccgacaucgagaagcucaaggaggccauccgggacaccaacaaggccgugcagagcgucugcuccagcguggggaacugcaucguggccaucaaguccguccaggacuacgugaacaaggagaucgugcccagcaucgcgcgccugggcugcgaggccgccgggcuccagcugggcaucgcccugacccagcacuacuccgagcucacgaacugcuucggggacaacaucggcagccugcaggagaagggcaucaagcugcagugcaucgccucccucuaccggaccaacaucaccgagaucuucaccacgagcaccgucgacaaguacgacaucuacgaccugcuguucaccgaguccaucaaggugcgcgugaucgacgucgaccucaacgacuacagcaucacccuccaggugcggcugccgcugcugacgcgccugcucaacacccagaucuacaagguggacuccaucagcuacaacauccagaaccgggagugguacaucccccugcccagccacaucaugaccaagggcgcguuccuggggggcgccgacgucaaggagugcaucgaggccuucuccagcuacaucugccccuccgacccgggcuucgugcucaaccacgagauggagagcugccuguccgggaacaucagccagugcccccgcaccacggugaccuccgacaucgucccccgguacgccuucgugaacggcggggucguggccaacugcaucaccaccacgugcacgugcaacggcaucgggaaccgcaucaaccagcccccggaccagggcgugaagaucaucacccacaaggagugcaacaccaucggcaucaacgggaugcuguucaacaccaacaaggagggcacccucgcguucuacacccccgacgacaucacccugaacaacagcgucgcccuggaccccaucgacaucuccaucgagcucaacaaggucaagagcgaccuggaggaguccaaggagugguaccggcgcagcaaccagaagcuggacuccaucgggagcuggcaccaguccagcacgaccaucaucaucauccucaucaugaugaucauccuguucaucaucaacaucaccaucaucaccaucgccaucaaguacuaccggauccagaagcgcaaccggguggaccagaacgacaagcccuacgugcugacgaacaagugaggacuagucccuguucccagagcccacuuuuuuuucuuuuuuugaaauaaaauagccugucuuucagaucucaaaggcucuuuucagagccaccaaaaaaaaaaaaaaaaaaaaaaaaaaaaaaaaaaaaaaaaaaaaaaaaaaaaaaaaaaaaaaaaaaaaaaaaaaaaaaaaaaaaaaaaaaaaaaaaaaaaa

SEQ ID NO: 26963 - RNA, 1837 nt, Artificial Sequence
  HPIV3/USA/629-D01959/2007__AGW51052.1 fusion glycoprotein mRNA gc (F0)
aggagaaagcuuaccaugcugaucagcauccucuccaucaucaccaccaugaucauggccagccacugccagaucgacaucaccaagcugcagcacgugggcguccucgugaacagccccaaggggaugaagaucucccagaacuucgagacccgcuaccugauccugagccucaucccgaagaucgaggacuccaacagcugcggcgaccagcagaucaagcaguacaagcggcugcuggaccgccucaucaucccccuguacgacgggcugaagcuccagaaggacgugaucgucacgaaccaggaguccaacgagaacaccgacccccggaccgagcgcuucuucggcggggugaucggcaccaucgcccugggcguggccacgagcgcgcagaucaccgccgccgucgcccugguggaggccaagcaggcgaaguccgacaucgagaagcucaaggaggccauccgggacaccaacaaggccgugcagagcguccaguccagcguggggaaccugaucguggccaucaaguccguccaggacuacgugaacaaggagaucgugcccagcaucgcgcgccugggcugcgaggccgccgggcuccagcugggcaucgcccugacccagcacuacuccgagcucacgaacaucuucggggacaacaucggcagccugcaggagaagggcaucaagcugcaggggaucgccucccucuaccggaccaacaucaccgagaucuucaccacgagcaccgucgacaaguacgacaucuacgaccugcuguucaccgaguccaucaaggugcgcgugaucgacgucgaccucaacgacuacagcaucacccuccaggugcggcugccgcugcugacgcgccugcucaacacccagaucuacaagguggacuccaucagcuacaacauccagaaccgggagugguacaucccccugcccagccacaucaugaccaagggcgcguuccuggggggcgccgacgucaaggagugcaucgaggccuucuccagcuacaucugccccuccgacccgggcuucgugcucaaccacgagauggagagcugccuguccgggaacaucagccagugcccccgcaccacggugaccuccgacaucgucccccgguacgccuucgugaacggcggggucguggccaacugcaucaccaccacgugcacgugcaacggcaucgggaaccgcaucaaccagcccccggaccagggcgugaagaucaucacccacaaggagugcaacaccaucggcaucaacgggaugcuguucaacaccaacaaggagggcacccucgcguucuacacccccgacgacaucacccugaacaacagcgucgcccuggaccccaucgacaucuccaucgagcucaacaaggccaagagcgaccuggaggaguccaaggaguggauccggcgcagcaaccagaagcuggacuccaucgggagcuggcaccaguccagcacgaccaucaucaucauccucaucaugaugaucauccuguucaucaucaacaucaccaucaucaccaucgccaucaaguacuaccggauccagaagcgcaaccggguggaccagaacgacaagcccuacgugcugacgaacaagugaggacuaguuauaagacugacuagcccgaugggccucccaacgggcccuccuccccuccuugcaccgagauuaauaaaaaaaaaaaaaaaaaaaaaaaaaaaaaaaaaaaaaaaaaaaaaaaaaaaaaaaaaaaaaaaaugcaucccccccccccccccccccccccccccccccaaaggcucuuuucagagccaccagaauu

SEQ ID NO: 26964 - RNA, 1837 nt, Artificial Sequence
  HPIV3/USA/629-D01959/2007__AGW51052.1 fusion glycoprotein mRNA gc (variant)
aggagaaagcuuaccaugcugaucagcauccucuccaucaucaccaccaugaucauggccagccacugccagaucgacaucaccaagcugcagcacgugggcguccucgugaacagccccaaggggaugaagaucucccagaacuucgagacccgcuaccugauccugagccucaucccgaagaucgaggacuccaacagcugcggcgaccagcagaucaagcaguacaagcggcugcuggaccgccucaucaucccccuguacgacgggcugaagcuccagaaggacgugaucgucacgaaccaggaguccaacgagaacaccgacccccggaccgagcgcuucuucggcggggugaucggcaccaucgcccugggcguggccacgagcgcgcagaucaccgccgccgucgcccugguggaggccaagcaggcgaaguccgacaucgagaagcucaaggaggccauccgggacaccaacaaggccgugcagagcgucugcuccagcguggggaacugcaucguggccaucaaguccguccaggacuacgugaacaaggagaucgugcccagcaucgcgcgccugggcugcgaggccgccgggcuccagcugggcaucgcccugacccagcacuacuccgagcucacgaacugcuucggggacaacaucggcagccugcaggagaagggcaucaagcugcagugcaucgccucccucuaccggaccaacaucaccgagaucuucaccacgagcaccgucgacaaguacgacaucuacgaccugcuguucaccgaguccaucaaggugcgcgugaucgacgucgaccucaacgacuacagcaucacccuccaggugcggcugccgcugcugacgcgccugcucaacacccagaucuacaagguggacuccaucagcuacaacauccagaaccgggagugguacaucccccugcccagccacaucaugaccaagggcgcguuccuggggggcgccgacgucaaggagugcaucgaggccuucuccagcuacaucugccccuccgacccgggcuucgugcucaaccacgagauggagagcugccuguccgggaacaucagccagugcccccgcaccacggugaccuccgacaucgucccccgguacgccuucgugaacggcggggucguggccaacugcaucaccaccacgugcacgugcaacggcaucgggaaccgcaucaaccagcccccggaccagggcgugaagaucaucacccacaaggagugcaacaccaucggcaucaacgggaugcuguucaacaccaacaaggagggcacccucgcguucuacacccccgacgacaucacccugaacaacagcgucgcccuggaccccaucgacaucuccaucgagcucaacaaggucaagagcgaccuggaggaguccaaggagugguaccggcgcagcaaccagaagcuggacuccaucgggagcuggcaccaguccagcacgaccaucaucaucauccucaucaugaugaucauccuguucaucaucaacaucaccaucaucaccaucgccaucaaguacuaccggauccagaagcgcaaccggguggaccagaacgacaagcccuacgugcugacgaacaagugaggacuaguuauaagacugacuagcccgaugggccucccaacgggcccuccuccccuccuugcaccgagauuaauaaaaaaaaaaaaaaaaaaaaaaaaaaaaaaaaaaaaaaaaaaaaaaaaaaaaaaaaaaaaaaaaugcaucccccccccccccccccccccccccccccccaaaggcucuuuucagagccaccagaauu

SEQ ID NO: 26965 - RNA, 1783 nt, Artificial Sequence
  HPIV3/Homo sapiens/PER/FLA4571/2008__AHX22069.1 fusion glycoprotein mRNA gc (F0)
gggaaauaagagagaaaagaagaguaagaagaaauauaagagccaccaugcccaucagcauccugcugaucaucaccacaaugaucauggccagccacugccagaucgacaucaccaagcugcagcacgugggcgugcucgugaacagccccaagggcaugaagaucagccagaacuucgagacacgcuaccugauccugagccugauccccaagaucgaggacagcaacagcugcggcgaccagcagaucaagcaguacaagcggcugcuggacagacugaucaucccccuguacgacggccugcggcugcagaaagacgugaucgugaccaaccaggaaagcaacgagaacaccgacccccggaccgagagauucuucggcggcgugaucggcacaaucgcccugggaguggccacaagcgcccagauuacagccgcuguggcccugguggaagccaagcaggccagaagcgacaucgagaagcugaaagaggccauccgggacaccaacaaggccgugcagagcgugcaguccagcgugggcaaucugaucguggccaucaaguccgugcaggacuacgugaacaaagaaaucgugcccucuaucgcccggcugggcugugaagcugccggacugcagcugggcauugcccugacacagcacuacagcgagcugaccaacaucuucggcgacaacaucggcagccugcaggaaaagggcauuaagcugcagggaaucgccagccuguaccgcaccaacaucaccgagaucuucaccaccagcaccguggauaaguacgacaucuacgaccugcuguucaccgagagcaucaaagugcgcgugaucgacguggaccugaacgacuacagcaucacccugcaagugcggcugccccugcugaccagacugcugaacacccagaucuacaagguggacagcaucuccuacaacauccagaaccgcgagugguacaucccucugcccagccacauuaugaccaagggcgccuuucugggcggagccgacgugaaagagugcaucgaggccuucagcagcuacaucugccccagcgacccuggcuucgugcugaaccacgagauggaaagcugccugagcggcaacaucagccagugccccagaaccaccgugaccuccgacaucgugcccagauacgccuucgugaauggcggcgugguggccaacugcaucaccaccaccuguaccugcaacggcaucggcaaccggaucaaccagccucccgaucagggcgugaagauuaucacccacaaagaguguaacaccaucggcaucaacggcaugcuguucaauaccaacaaagagggcacccuggccuucuacacccccgacgauaucacccugaacaacuccguggcucuggaccccaucgacaucuccaucgagcugaacaaggccaagagcgaccuggaagaguccaaagaguggauccggcggagcaaccagaagcuggacucuaucggcagcuggcaccagagcagcaccaccaucaucgugauccugauuaugaugauuauccuguucaucaucaacauuaccaucaucacuaucgccauuaaguacuaccggauccagaaacggaaccggguggaccagaaugacaagcccuacgugcugacaaacaagugauaauaggcuggagccucgguggccaugcuucuugccccuugggccuccccccagccccuccuccccuuccugcacccguacccccguggucuuugaauaaagucugagugggcggc

SEQ ID NO: 26966 - protein, 539 aa, Artificial Sequence; identical to SEQ ID NO: 14648
  HMPV/NL/1/99__AAQ90145.1 fusion glycoprotein (F0)

SEQ ID NO: 26967 - protein, 539 aa, Artificial Sequence
  HMPV/NL/1/99__AAQ90145.1 fusion glycoprotein (variant)
MSWKVMIIISLLITPQHGLKESYLEESCSTITEGYLSVLRTGWYTNVFTLEVGDVENLTCTDGPSLIKTELDLTKSALRELKTVSADQLAREEQIENPRRRRFVLGAIALGVATAAAVTAGIAIAKTIRLESEVNAIKGALKQTNEAVSTLGNGVRVLATAVRELKEFVSKNLTSAINRNKCDIADLKMAVSFSQFNRRFLNVVRQFSDNAGITPAISLDLMTDAELARAVSYMPTSAGQIKLMLENRAMVRRKGFGILIGVYGSSVIYMVQLPIFGVIDTPCWIIKAAPSCSEKNGNYACLLREDQGWYCKNAGSTVYYPNEKDCETRGDHVFCDTAAGINVAEQSRECNINISTTNYPCKVSTGRHPISMVALSPLGALVACYKGVSCSIGSNWVGIIKQLPKGCSYITNQDADTVTIDNTVYQLSKVEGEQHVIKGRPVSSSFDPIKFPEDQFNVALDQVFESIENSQALVDQSNKILNSAEKGNTGFIIVVILVAVLGLTMISVSIIIIIKKTRKPTGAPPELNGVTNGGFIPHS

SEQ ID NO: 26968 - protein, 539 aa, Artificial Sequence
  HMPV/NL/1/99__AAQ90145.1 fusion glycoprotein (variant)
MSWKVMIIISLLITPQHGLKESYLEESCSTITEGYLSVLRTGWYTNVFTLEVGDVENLTCTDGPSLIKTELDLTKSALRELKTVSADQLAREEQIENPRRRRFVLGAIALGVATAAAVTAGIAIAKTIRLESEVNAIKGALKQTNEAVSTLGNGVRVLATAVRELKEFVSKNLTSAINRNKCDIPDLKMAVSFSQFNRRFLNVVRQFSDNAGITPAISLDLMTDAELARAVSYMPTSAGQIKLMLENRAMVRRKGFGILIGVYGSSVIYMVQLPIFGVIDTPCWIIKAAPSCSEKNGNYACLLREDQGWYCKNAGSTVYYPNEKDCETRGDHVFCDTAAGINVAEQSRECNINISTTNYPCKVSTGRHPISMVALSPLGALVACYKGVSCSIGSNWVGIIKQLPKGCSYITNQDADTVTIDNTVYQLSKVEGEQHVIKGRPVSSSFDPIKFPEDQFNVALDQVFESIENSQALVDQSNKILNSAEKGNTGFIIVVILVAVLGLTMISVSIIIIIKKTRKPTGAPPELNGVTNGGFIPHS

SEQ ID NO: 26969 - protein, 539 aa, Artificial Sequence
  HMPV/00-1__AAK62968.2 fusion glycoprotein (F0)
MSWKVVIIFSLLITPQHGLKESYLEESCSTITEGYLSVLRTGWYTNVFTLEVGDVENLTCADGPSLIKTELDLTKSALRELRTVSADQLAREEQIENPRQSRFVLGAIALGVATAAAVTAGVAIAKTIRLESEVTAIKNALKKTNEAVSTLGNGVRVLATAVRELKDFVSKNLTRAINKNKCDIADLKMAVSFSQFNRRFLNVVRQFSDNAGITPAISLDLMTDAELARAVSNMPTSAGQIKLMLENRAMVRRKGFGFLIGVYGSSVIYMVQLPIFGVIDTPCWIVKAAPSCSGKKGNYACLLREDQGWYCQNAGSTVYYPNEKDCETRGDHVFCDTAAGINVAEQSKECNINISTTNYPCKVSTGRHPISMVALSPLGALVACYKGVSCSIGSNRVGIIKQLNKGCSYITNQDADTVTIDNTVYQLSKVEGEQHVIKGRPVSSSFDPVKFPEDQFNVALDQVFESIENSQALVDQSNRILSSAEKGNTGFIIVIILIAVLGSTMILVSVFIIIKKTKKPTGAPPELSGVTNNGFIPHN

SEQ ID NO: 26970 - protein, 539 aa, Artificial Sequence
  HMPV/00-1__AAK62968.2 fusion glycoprotein (variant)
MSWKVVIIFSLLITPQHGLKESYLEESCSTITEGYLSVLRTGWYTNVFTLEVGDVENLTCADGPSLIKTELDLTKSALRELRTVSADQLAREEQIENPRRRRFVLGAIALGVATAAAVTAGVAIAKTIRLESEVTAIKNALKKTNEAVSTLGNGVRVLATAVRELKDFVSKNLTRAINKNKCDIADLKMAVSFSQFNRRFLNVVRQFSDNAGITPAISLDLMTDAELARAVSNMPTSAGQIKLMLENRAMVRRKGFGFLIGVYGSSVIYMVQLPIFGVIDTPCWIVKAAPSCSEKKGNYACLLREDQGWYCQNAGSTVYYPNEKDCETRGDHVFCDTAAGINVAEQSKECNINISTTNYPCKVSTGRHPISMVALSPLGALVACYKGVSCSIGSNRVGIIKQLNKGCSYITNQDADTVTIDNTVYQLSKVEGEQHVIKGRPVSSSFDPVKFPEDQFNVALDQVFESIENSQALVDQSNRILSSAEKGNTGFIIVIILIAVLGSTMILVSVFIIIKKTKKPTGAPPELSGVTNNGFIPHN

SEQ ID NO: 26971 - protein, 539 aa, Artificial Sequence
  HMPV/00-1__AAK62968.2 fusion glycoprotein (variant)
MSWKVVIIFSLLITPQHGLKESYLEESCSTITEGYLSVLRTGWYTNVFTLEVGDVENLTCADGPSLIKTELDLTKSALRELRTVSADQLAREEQIENPRRRRFVLGAIALGVATAAAVTAGVAIAKTIRLESEVTAIKNALKKTNEAVSTLGNGVRVLATAVRELKDFVSKNLTRAINKNKCDIPDLKMAVSFSQFNRRFLNVVRQFSDNAGITPAISLDLMTDAELARAVSNMPTSAGQIKLMLENRAMVRRKGFGFLIGVYGSSVIYMVQLPIFGVIDTPCWIVKAAPSCSEKKGNYACLLREDQGWYCQNAGSTVYYPNEKDCETRGDHVFCDTAAGINVAEQSKECNINISTTNYPCKVSTGRHPISMVALSPLGALVACYKGVSCSIGSNRVGIIKQLNKGCSYITNQDADTVTIDNTVYQLSKVEGEQHVIKGRPVSSSFDPVKFPEDQFNVALDQVFESIENSQALVDQSNRILSSAEKGNTGFIIVIILIAVLGSTMILVSVFIIIKKTKKPTGAPPELSGVTNNGFIPHN

SEQ ID NO: 26972 - RNA, 1620 nt, Artificial Sequence
  HMPV/NL/1/99__AAQ90145.1 fusion glycoprotein CDS gc (F0)
augagcuggaaggugaugaucaucaucucccugcucaucaccccccagcacggccugaaggagagcuaccucgaggaguccugcagcaccaucaccgagggcuaccuguccgugcugcgcacggggugguacaccaacgucuucacccucgaggugggcgacguggagaaccugaccugcacggacgggcccagccugaucaagaccgagcucgaccugaccaaguccgcccugcgggagcucaagaccgucagcgccgaccagcuggcgcgcgaggagcagaucgagaacccgcggcagucccgcuucgugcugggcgccaucgcccucgggguggccacggccgcggccgucaccgccggcaucgccaucgcgaagaccauccggcuggagagcgaggugaacgccaucaagggcgcccugaagcagaccaacgaggccguguccacgcucgggaacggcguccgcgugcuggccaccgcggugcgggagcugaaggaguucgucagcaagaaccucaccuccgccaucaaccgcaacaagugcgacaucgccgaccugaagauggccgugagcuucucccaguucaaccggcgcuuccugaacgugguccggcaguucagcgacaacgccgggaucacccccgcgaucucccucgaccugaugacggacgccgagcuggcccgcgccgugagcuacaugcccaccuccgccggccagaucaagcucaugcuggagaaccgggcgauggugcgccggaagggguucggcauccugaucggcgucuacgggagcuccgugaucuacauggugcagcuccccaucuucggcgucaucgacaccccgugcuggaucaucaaggccgcccccagcugcagcgagaagaacgggaacuacgccugccugcugcgcgaggaccagggcugguacugcaagaacgccggcuccaccguguacuaccccaacgagaaggacugcgagacgcggggggaccacguguucugcgacaccgcggccggcaucaacgucgccgagcagagccgcgagugcaacaucaacaucuccaccaccaacuaccccugcaaggugagcacggggcggcacccgaucuccauggucgcccucagcccccugggcgcgcugguggccugcuacaaggggguguccugcagcaucggcuccaacugggucggcaucaucaagcagcuccccaaggggugcagcuacaucaccaaccaggacgccgacaccgugaccaucgacaacacgguguaccagcuguccaaggucgagggcgagcagcacgugaucaaggggcgccccgugagcuccagcuucgacccgaucaaguuccccgaggaccaguucaacgucgcccuggaccagguguucgaguccaucgagaacagccaggcccucguggaccaguccaacaagauccugaacagcgcggagaagggcaacaccggguucaucaucgucgugauccugguggccguccucggccugaccaugaucuccgugagcaucaucaucaucaucaagaagacccggaagcccacgggcgcccccccggagcugaacggggugaccaacggcggguucaucccccacagcuga

SEQ ID NO: 26973 - RNA, 1620 nt, Artificial Sequence
  HMPV/NL/1/99__AAQ90145.1 fusion glycoprotein CDS gc (variant)
augagcuggaaggugaugaucaucaucucccugcucaucaccccccagcacggccugaaggagagcuaccucgaggaguccugcagcaccaucaccgagggcuaccuguccgugcugcgcacggggugguacaccaacgucuucacccucgaggugggcgacguggagaaccugaccugcacggacgggcccagccugaucaagaccgagcucgaccugaccaaguccgcccugcgggagcucaagaccgucagcgccgaccagcuggcgcgcgaggagcagaucgagaacccgcggcggcgccgcuucgugcugggcgccaucgcccucgggguggccacggccgcggccgucaccgccggcaucgccaucgcgaagaccauccggcuggagagcgaggugaacgccaucaagggcgcccugaagcagaccaacgaggccguguccacgcucgggaacggcguccgcgugcuggccaccgcggugcgggagcugaaggaguucgucagcaagaaccucaccuccgccaucaaccgcaacaagugcgacaucgccgaccugaagauggccgugagcuucucccaguucaaccggcgcuuccugaacgugguccggcaguucagcgacaacgccgggaucacccccgcgaucucccucgaccugaugacggacgccgagcuggcccgcgccgugagcuacaugcccaccuccgccggccagaucaagcucaugcuggagaaccgggcgauggugcgccggaagggguucggcauccugaucggcgucuacgggagcuccgugaucuacauggugcagcuccccaucuucggcgucaucgacaccccgugcuggaucaucaaggccgcccccagcugcagcgagaagaacgggaacuacgccugccugcugcgcgaggaccagggcugguacugcaagaacgccggcuccaccguguacuaccccaacgagaaggacugcgagacgcggggggaccacguguucugcgacaccgcggccggcaucaacgucgccgagcagagccgcgagugcaacaucaacaucuccaccaccaacuaccccugcaaggugagcacggggcggcacccgaucuccauggucgcccucagcccccugggcgcgcugguggccugcuacaaggggguguccugcagcaucggcuccaacugggucggcaucaucaagcagcuccccaaggggugcagcuacaucaccaaccaggacgccgacaccgugaccaucgacaacacgguguaccagcuguccaaggucgagggcgagcagcacgugaucaaggggcgccccgugagcuccagcuucgacccgaucaaguuccccgaggaccaguucaacgucgcccuggaccagguguucgaguccaucgagaacagccaggcccucguggaccaguccaacaagauccugaacagcgcggagaagggcaacaccggguucaucaucgucgugauccugguggccguccucggccugaccaugaucuccgugagcaucaucaucaucaucaagaagacccggaagcccacgggcgcccccccggagcugaacggggugaccaacggcggguucaucccccacagcuga

SEQ ID NO: 26974 - RNA, 1620 nt, Artificial Sequence
  HMPV/NL/1/99__AAQ90145.1 fusion glycoprotein CDS gc (variant)
augagcuggaaggugaugaucaucaucucccugcucaucaccccccagcacggccugaaggagagcuaccucgaggaguccugcagcaccaucaccgagggcuaccuguccgugcugcgcacggggugguacaccaacgucuucacccucgaggugggcgacguggagaaccugaccugcacggacgggcccagccugaucaagaccgagcucgaccugaccaaguccgcccugcgggagcucaagaccgucagcgccgaccagcuggcgcgcgaggagcagaucgagaacccgcggcggcgccgcuucgugcugggcgccaucgcccucgggguggccacggccgcggccgucaccgccggcaucgccaucgcgaagaccauccggcuggagagcgaggugaacgccaucaagggcgcccugaagcagaccaacgaggccguguccacgcucgggaacggcguccgcgugcuggccaccgcggugcgggagcugaaggaguucgucagcaagaaccucaccuccgccaucaaccgcaacaagugcgacauccccgaccugaagauggccgugagcuucucccaguucaaccggcgcuuccugaacgugguccggcaguucagcgacaacgccgggaucacccccgcgaucucccucgaccugaugacggacgccgagcuggcccgcgccgugagcuacaugcccaccuccgccggccagaucaagcucaugcuggagaaccgggcgauggugcgccggaagggguucggcauccugaucggcgucuacgggagcuccgugaucuacauggugcagcuccccaucuucggcgucaucgacaccccgugcuggaucaucaaggccgcccccagcugcagcgagaagaacgggaacuacgccugccugcugcgcgaggaccagggcugguacugcaagaacgccggcuccaccguguacuaccccaacgagaaggacugcgagacgcggggggaccacguguucugcgacaccgcggccggcaucaacgucgccgagcagagccgcgagugcaacaucaacaucuccaccaccaacuaccccugcaaggugagcacggggcggcacccgaucuccauggucgcccucagcccccugggcgcgcugguggccugcuacaaggggguguccugcagcaucggcuccaacugggucggcaucaucaagcagcuccccaaggggugcagcuacaucaccaaccaggacgccgacaccgugaccaucgacaacacgguguaccagcuguccaaggucgagggcgagcagcacgugaucaaggggcgccccgugagcuccagcuucgacccgaucaaguuccccgaggaccaguucaacgucgcccuggaccagguguucgaguccaucgagaacagccaggcccucguggaccaguccaacaagauccugaacagcgcggagaagggcaacaccggguucaucaucgucgugauccugguggccguccucggccugaccaugaucuccgugagcaucaucaucaucaucaagaagacccggaagcccacgggcgcccccccggagcugaacggggugaccaacggcggguucaucccccacagcuga

SEQ ID NO: 26975 - RNA, 1620 nt, Artificial Sequence
  HMPV/00-1__AAK62968.2 fusion glycoprotein CDS gc (F0)
augagcuggaagguggucaucaucuucucccugcucaucaccccccagcacggccugaaggagagcuaccucgaggaguccugcagcaccaucaccgagggcuaccuguccgugcugcgcacggggugguacaccaacgucuucacccucgaggugggcgacguggagaaccugaccugcgccgacgggcccagccugaucaagacggagcucgaccugaccaaguccgcccugcgggagcuccgcaccgucagcgcggaccagcuggcccgggaggagcagaucgagaacccgcgccagucccgguucgugcugggcgccaucgcccucgggguggccaccgcggccgccgucacggccggcguggcgaucgccaagaccauccgccuggagagcgaggugaccgccaucaagaacgcccugaagaagaccaacgaggccgucuccacgcucggcaacggggugcgggugcuggcgaccgccguccgcgagcugaaggacuucgugagcaagaaccucacccgggccaucaacaagaacaagugcgacaucgccgaccugaagauggccguguccuucagccaguucaaccgccgguuccugaacgucgugcgccaguucuccgacaacgcgggcaucacccccgccaucagccucgaccugaugacggacgccgagcuggcccgggccguguccaacaugcccaccagcgcggggcagaucaagcucaugcuggagaaccgcgccaugguccggcgcaagggcuucggguuccugaucggcguguacggcuccagcgugaucuacaugguccagcuccccaucuucggggugaucgacaccccgugcuggaucgugaaggccgcccccuccugcagcggcaagaaggggaacuacgccugccugcugcgggaggaccagggcugguacugccagaacgcgggcagcaccgucuacuaccccaacgagaaggacugcgagacgcgcggggaccacguguucugcgacaccgccgccggcaucaacgucgccgagcaguccaaggagugcaacaucaacaucagcaccaccaacuaccccugcaagguguccacggggcggcacccgaucagcaugguggcgcucuccccccugggcgcccuggucgccugcuacaagggggugagcugcuccaucggcagcaaccgcgugggcaucaucaagcagcucaacaaggggugcuccuacaucaccaaccaggacgccgacaccgucaccaucgacaacacgguguaccagcugagcaagguggagggcgagcagcacgucaucaaggggcggcccguguccagcuccuucgaccccgugaaguucccggaggaccaguucaacgucgcccuggaccagguguucgagagcaucgagaacucccaggcgcucguggaccagagcaaccgcauccuguccagcgccgagaagggcaacaccggguucaucaucgucaucauccugaucgccgugcucggcuccaccaugauccuggugagcgucuucaucaucaucaagaagaccaagaagcccacgggcgccccccccgagcugagcggggugaccaacaacggcuucaucccgcacaacuga

SEQ ID NO: 26976 - RNA, 1620 nt, Artificial Sequence
  HMPV/00-1__AAK62968.2 fusion glycoprotein CDS gc (variant)
augagcuggaagguggucaucaucuucucccugcucaucaccccccagcacggccugaaggagagcuaccucgaggaguccugcagcaccaucaccgagggcuaccuguccgugcugcgcacggggugguacaccaacgucuucacccucgaggugggcgacguggagaaccugaccugcgccgacgggcccagccugaucaagacggagcucgaccugaccaaguccgcccugcgggagcuccgcaccgucagcgcggaccagcuggcccgggaggagcagaucgagaacccgcgccggcgccgguucgugcugggcgccaucgcccucgggguggccaccgcggccgccgucacggccggcguggcgaucgccaagaccauccgccuggagagcgaggugaccgccaucaagaacgcccugaagaagaccaacgaggccgucuccacgcucggcaacggggugcgggugcuggcgaccgccguccgcgagcugaaggacuucgugagcaagaaccucacccgggccaucaacaagaacaagugcgacaucgccgaccugaagauggccguguccuucagccaguucaaccgccgguuccugaacgucgugcgccaguucuccgacaacgcgggcaucacccccgccaucagccucgaccugaugacggacgccgagcuggcccgggccguguccaacaugcccaccagcgcggggcagaucaagcucaugcuggagaaccgcgccaugguccggcgcaagggcuucggguuccugaucggcguguacggcuccagcgugaucuacaugguccagcuccccaucuucggggugaucgacaccccgugcuggaucgugaaggccgcccccuccugcagcgagaagaaggggaacuacgccugccugcugcgggaggaccagggcugguacugccagaacgcgggcagcaccgucuacuaccccaacgagaaggacugcgagacgcgcggggaccacguguucugcgacaccgccgccggcaucaacgucgccgagcaguccaaggagugcaacaucaacaucagcaccaccaacuaccccugcaagguguccacggggcggcacccgaucagcaugguggcgcucuccccccugggcgcccuggucgccugcuacaagggggugagcugcuccaucggcagcaaccgcgugggcaucaucaagcagcucaacaaggggugcuccuacaucaccaaccaggacgccgacaccgucaccaucgacaacacgguguaccagcugagcaagguggagggcgagcagcacgucaucaaggggcggcccguguccagcuccuucgaccccgugaaguucccggaggaccaguucaacgucgcccuggaccagguguucgagagcaucgagaacucccaggcgcucguggaccagagcaaccgcauccuguccagcgccgagaagggcaacaccggguucaucaucgucaucauccugaucgccgugcucggcuccaccaugauccuggugagcgucuucaucaucaucaagaagaccaagaagcccacgggcgccccccccgagcugagcggggugaccaacaacggcuucaucccgcacaacuga

SEQ ID NO: 26977 - RNA, 1620 nt, Artificial Sequence
  HMPV/00-1__AAK62968.2 fusion glycoprotein CDS gc (variant)
augagcuggaagguggucaucaucuucucccugcucaucaccccccagcacggccugaaggagagcuaccucgaggaguccugcagcaccaucaccgagggcuaccuguccgugcugcgcacggggugguacaccaacgucuucacccucgaggugggcgacguggagaaccugaccugcgccgacgggcccagccugaucaagacggagcucgaccugaccaaguccgcccugcgggagcuccgcaccgucagcgcggaccagcuggcccgggaggagcagaucgagaacccgcgccggcgccgguucgugcugggcgccaucgcccucgggguggccaccgcggccgccgucacggccggcguggcgaucgccaagaccauccgccuggagagcgaggugaccgccaucaagaacgcccugaagaagaccaacgaggccgucuccacgcucggcaacggggugcgggugcuggcgaccgccguccgcgagcugaaggacuucgugagcaagaaccucacccgggccaucaacaagaacaagugcgacauccccgaccugaagauggccguguccuucagccaguucaaccgccgguuccugaacgucgugcgccaguucuccgacaacgcgggcaucacccccgccaucagccucgaccugaugacggacgccgagcuggcccgggccguguccaacaugcccaccagcgcggggcagaucaagcucaugcuggagaaccgcgccaugguccggcgcaagggcuucggguuccugaucggcguguacggcuccagcgugaucuacaugguccagcuccccaucuucggggugaucgacaccccgugcuggaucgugaaggccgcccccuccugcagcgagaagaaggggaacuacgccugccugcugcgggaggaccagggcugguacugccagaacgcgggcagcaccgucuacuaccccaacgagaaggacugcgagacgcgcggggaccacguguucugcgacaccgccgccggcaucaacgucgccgagcaguccaaggagugcaacaucaacaucagcaccaccaacuaccccugcaagguguccacggggcggcacccgaucagcaugguggcgcucuccccccugggcgcccuggucgccugcuacaagggggugagcugcuccaucggcagcaaccgcgugggcaucaucaagcagcucaacaaggggugcuccuacaucaccaaccaggacgccgacaccgucaccaucgacaacacgguguaccagcugagcaagguggagggcgagcagcacgucaucaaggggcggcccguguccagcuccuucgaccccgugaaguucccggaggaccaguucaacgucgcccuggaccagguguucgagagcaucgagaacucccaggcgcucguggaccagagcaaccgcauccuguccagcgccgagaagggcaacaccggguucaucaucgucaucauccugaucgccgugcucggcuccaccaugauccuggugagcgucuucaucaucaucaagaagaccaagaagcccacgggcgccccccccgagcugagcggggugaccaacaacggcuucaucccgcacaacuga

SEQ ID NO: 26978 - RNA, 1620 nt, Artificial Sequence
  HMPV/TN/92-4__ABM67072.1 fusion glycoprotein CDS gc (F0)
augagcuggaagguggugauuaucuucagccugcugauuacaccucaacacggccugaaggagagcuaccuggaagagagcugcuccaccaucaccgagggcuaccugagcgugcugcggaccggcugguacaccaacguguucacccuggaggugggcgacguggagaaccugaccugcagcgacggcccuagccugaucaagaccgagcuggaccugaccaagagcgcucugagagagcugaagaccguguccgccgaccagcuggccagagaggaacagaucgagaacccucggcagagcagauucgugcugggcgccaucgcucugggagucgccgcugccgcugcagugacagcuggaguggccauugcuaagaccaucagacuggaaagcgaggugacagccaucaacaaugcccugaagaagaccaacgaggccgugagcacccugggcaauggagugagagugcuggccacagccgugcgggagcugaaggacuucgugagcaagaaccugaccagagccaucaacaagaacaagugcgacaucgaugaccugaagauggccgugagcuucucccaguucaacagacgguuccugaacguggugagacaguucuccgacaacgcuggaaucacaccugccauuagccuggaccugaugaccgacgccgagcuggcuagagccgugcccaacaugcccaccagcgcuggccagaucaagcugaugcuggagaacagagccauggugcggagaaagggcuucggcauccugauugggguguauggaagcuccgugaucuacauggugcagcugcccaucuucggcgugaucgacacacccugcuggaucgugaaggccgcuccuagcugcuccgagaagaaaggaaacuaugccugucugcugagagaggaccagggcugguacugccagaacgccggaagcacaguguacuaucccaacgagaaggacugcgagaccagaggcgaccacguguucugcgacaccgcugccggaaucaacguggccgagcagagcaaggagugcaacaucaacaucagcacaaccaacuaccccugcaaggugagcaccggacggcaccccaucagcaugguggcucugagcccucugggcgcucugguggccugcuauaagggcguguccuguagcaucggcagcaaucgggugggcaucaucaagcagcugaacaagggaugcuccuacaucaccaaccaggacgccgacaccgugaccaucgacaacaccguguaccagcugagcaagguggagggcgagcagcacgugaucaagggcagacccgugagcuccagcuucgaccccaucaaguucccugaggaccaguucaacguggcccuggaccagguguuugagaacaucgagaacagccaggcccugguggaccagagcaacagaauccuguccagcgcugagaagggcaacaccggcuucaucauugugaucauucugaucgccgugcugggcagcuccaugauccuggugagcaucuucaucauuaucaagaagaccaagaaacccaccggagccccuccugagcugagcggcgugaccaacaauggcuucauuccccacaacuga

SEQ ID NO: 26979 - RNA, 1892 nt, Artificial Sequence
  HMPV/NL/1/99__AAQ90145.1 fusion glycoprotein mRNA gc (F0) R10327
aggagagucccgcagucggcguccagcggcucugcuuguucgugugugugucguugcaggccuuauucaagcuuaccaugagcuggaaggugaugaucaucaucucccugcucaucaccccccagcacggccugaaggagagcuaccucgaggaguccugcagcaccaucaccgagggcuaccuguccgugcugcgcacggggugguacaccaacgucuucacccucgaggugggcgacguggagaaccugaccugcacggacgggcccagccugaucaagaccgagcucgaccugaccaaguccgcccugcgggagcucaagaccgucagcgccgaccagcuggcgcgcgaggagcagaucgagaacccgcggcagucccgcuucgugcugggcgccaucgcccucgggguggccacggccgcggccgucaccgccggcaucgccaucgcgaagaccauccggcuggagagcgaggugaacgccaucaagggcgcccugaagcagaccaacgaggccguguccacgcucgggaacggcguccgcgugcuggccaccgcggugcgggagcugaaggaguucgucagcaagaaccucaccuccgccaucaaccgcaacaagugcgacaucgccgaccugaagauggccgugagcuucucccaguucaaccggcgcuuccugaacgugguccggcaguucagcgacaacgccgggaucacccccgcgaucucccucgaccugaugacggacgccgagcuggcccgcgccgugagcuacaugcccaccuccgccggccagaucaagcucaugcuggagaaccgggcgauggugcgccggaagggguucggcauccugaucggcgucuacgggagcuccgugaucuacauggugcagcuccccaucuucggcgucaucgacaccccgugcuggaucaucaaggccgcccccagcugcagcgagaagaacgggaacuacgccugccugcugcgcgaggaccagggcugguacugcaagaacgccggcuccaccguguacuaccccaacgagaaggacugcgagacgcggggggaccacguguucugcgacaccgcggccggcaucaacgucgccgagcagagccgcgagugcaacaucaacaucuccaccaccaacuaccccugcaaggugagcacggggcggcacccgaucuccauggucgcccucagcccccugggcgcgcugguggccugcuacaaggggguguccugcagcaucggcuccaacugggucggcaucaucaagcagcuccccaaggggugcagcuacaucaccaaccaggacgccgacaccgugaccaucgacaacacgguguaccagcuguccaaggucgagggcgagcagcacgugaucaaggggcgccccgugagcuccagcuucgacccgaucaaguuccccgaggaccaguucaacgucgcccuggaccagguguucgaguccaucgagaacagccaggcccucguggaccaguccaacaagauccugaacagcgcggagaagggcaacaccggguucaucaucgucgugauccugguggccguccucggccugaccaugaucuccgugagcaucaucaucaucaucaagaagacccggaagcccacgggcgcccccccggagcugaacggggugaccaacggcggguucaucccccacagcugaggacuagucccuguucccagagcccacuuuuuuuucuuuuuuugaaauaaaauagccugucuuucagaucucaaaggcucuuuucagagccaccaaaaaaaaaaaaaaaaaaaaaaaaaaaaaaaaaaaaaaaaaaaaaaaaaaaaaaaaaaaaaaaaaaaaaaaaaaaaaaaaaaaaaaaaaaaaaaaaaaaaa

SEQ ID NO: 26980 - RNA, 1892 nt, Artificial Sequence
  HMPV/NL/1/99__AAQ90145.1 fusion glycoprotein mRNA gc (variant) R10328
aggagagucccgcagucggcguccagcggcucugcuuguucgugugugugucguugcaggccuuauucaagcuuaccaugagcuggaaggugaugaucaucaucucccugcucaucaccccccagcacggccugaaggagagcuaccucgaggaguccugcagcaccaucaccgagggcuaccuguccgugcugcgcacggggugguacaccaacgucuucacccucgaggugggcgacguggagaaccugaccugcacggacgggcccagccugaucaagaccgagcucgaccugaccaaguccgcccugcgggagcucaagaccgucagcgccgaccagcuggcgcgcgaggagcagaucgagaacccgcggcggcgccgcuucgugcugggcgccaucgcccucgggguggccacggccgcggccgucaccgccggcaucgccaucgcgaagaccauccggcuggagagcgaggugaacgccaucaagggcgcccugaagcagaccaacgaggccguguccacgcucgggaacggcguccgcgugcuggccaccgcggugcgggagcugaaggaguucgucagcaagaaccucaccuccgccaucaaccgcaacaagugcgacaucgccgaccugaagauggccgugagcuucucccaguucaaccggcgcuuccugaacgugguccggcaguucagcgacaacgccgggaucacccccgcgaucucccucgaccugaugacggacgccgagcuggcccgcgccgugagcuacaugcccaccuccgccggccagaucaagcucaugcuggagaaccgggcgauggugcgccggaagggguucggcauccugaucggcgucuacgggagcuccgugaucuacauggugcagcuccccaucuucggcgucaucgacaccccgugcuggaucaucaaggccgcccccagcugcagcgagaagaacgggaacuacgccugccugcugcgcgaggaccagggcugguacugcaagaacgccggcuccaccguguacuaccccaacgagaaggacugcgagacgcggggggaccacguguucugcgacaccgcggccggcaucaacgucgccgagcagagccgcgagugcaacaucaacaucuccaccaccaacuaccccugcaaggugagcacggggcggcacccgaucuccauggucgcccucagcccccugggcgcgcugguggccugcuacaaggggguguccugcagcaucggcuccaacugggucggcaucaucaagcagcuccccaaggggugcagcuacaucaccaaccaggacgccgacaccgugaccaucgacaacacgguguaccagcuguccaaggucgagggcgagcagcacgugaucaaggggcgccccgugagcuccagcuucgacccgaucaaguuccccgaggaccaguucaacgucgcccuggaccagguguucgaguccaucgagaacagccaggcccucguggaccaguccaacaagauccugaacagcgcggagaagggcaacaccggguucaucaucgucgugauccugguggccguccucggccugaccaugaucuccgugagcaucaucaucaucaucaagaagacccggaagcccacgggcgcccccccggagcugaacggggugaccaacggcggguucaucccccacagcugaggacuagucccuguucccagagcccacuuuuuuuucuuuuuuugaaauaaaauagccugucuuucagaucucaaaggcucuuuucagagccaccaaaaaaaaaaaaaaaaaaaaaaaaaaaaaaaaaaaaaaaaaaaaaaaaaaaaaaaaaaaaaaaaaaaaaaaaaaaaaaaaaaaaaaaaaaaaaaaaaaaaa

SEQ ID NO: 26981 - RNA, 1892 nt, Artificial Sequence
  HMPV/NL/1/99__AAQ90145.1 fusion glycoprotein mRNA gc (variant) R10329
aggagagucccgcagucggcguccagcggcucugcuuguucgugugugugucguugcaggccuuauucaagcuuaccaugagcuggaaggugaugaucaucaucucccugcucaucaccccccagcacggccugaaggagagcuaccucgaggaguccugcagcaccaucaccgagggcuaccuguccgugcugcgcacggggugguacaccaacgucuucacccucgaggugggcgacguggagaaccugaccugcacggacgggcccagccugaucaagaccgagcucgaccugaccaaguccgcccugcgggagcucaagaccgucagcgccgaccagcuggcgcgcgaggagcagaucgagaacccgcggcggcgccgcuucgugcugggcgccaucgcccucgggguggccacggccgcggccgucaccgccggcaucgccaucgcgaagaccauccggcuggagagcgaggugaacgccaucaagggcgcccugaagcagaccaacgaggccguguccacgcucgggaacggcguccgcgugcuggccaccgcggugcgggagcugaaggaguucgucagcaagaaccucaccuccgccaucaaccgcaacaagugcgacauccccgaccugaagauggccgugagcuucucccaguucaaccggcgcuuccugaacgugguccggcaguucagcgacaacgccgggaucacccccgcgaucucccucgaccugaugacggacgccgagcuggcccgcgccgugagcuacaugcccaccuccgccggccagaucaagcucaugcuggagaaccgggcgauggugcgccggaagggguucggcauccugaucggcgucuacgggagcuccgugaucuacauggugcagcuccccaucuucggcgucaucgacaccccgugcuggaucaucaaggccgcccccagcugcagcgagaagaacgggaacuacgccugccugcugcgcgaggaccagggcugguacugcaagaacgccggcuccaccguguacuaccccaacgagaaggacugcgagacgcggggggaccacguguucugcgacaccgcggccggcaucaacgucgccgagcagagccgcgagugcaacaucaacaucuccaccaccaacuaccccugcaaggugagcacggggcggcacccgaucuccauggucgcccucagcccccugggcgcgcugguggccugcuacaaggggguguccugcagcaucggcuccaacugggucggcaucaucaagcagcuccccaaggggugcagcuacaucaccaaccaggacgccgacaccgugaccaucgacaacacgguguaccagcuguccaaggucgagggcgagcagcacgugaucaaggggcgccccgugagcuccagcuucgacccgaucaaguuccccgaggaccaguucaacgucgcccuggaccagguguucgaguccaucgagaacagccaggcccucguggaccaguccaacaagauccugaacagcgcggagaagggcaacaccggguucaucaucgucgugauccugguggccguccucggccugaccaugaucuccgugagcaucaucaucaucaucaagaagacccggaagcccacgggcgcccccccggagcugaacggggugaccaacggcggguucaucccccacagcugaggacuagucccuguucccagagcccacuuuuuuuucuuuuuuugaaauaaaauagccugucuuucagaucucaaaggcucuuuucagagccaccaaaaaaaaaaaaaaaaaaaaaaaaaaaaaaaaaaaaaaaaaaaaaaaaaaaaaaaaaaaaaaaaaaaaaaaaaaaaaaaaaaaaaaaaaaaaaaaaaaaaa

SEQ ID NO: 26982 - RNA, 1892 nt, Artificial Sequence
  HMPV/00-1__AAK62968.2 fusion glycoprotein mRNA gc (F0) R10324
aggagagucccgcagucggcguccagcggcucugcuuguucgugugugugucguugcaggccuuauucaagcuuaccaugagcuggaagguggucaucaucuucucccugcucaucaccccccagcacggccugaaggagagcuaccucgaggaguccugcagcaccaucaccgagggcuaccuguccgugcugcgcacggggugguacaccaacgucuucacccucgaggugggcgacguggagaaccugaccugcgccgacgggcccagccugaucaagacggagcucgaccugaccaaguccgcccugcgggagcuccgcaccgucagcgcggaccagcuggcccgggaggagcagaucgagaacccgcgccagucccgguucgugcugggcgccaucgcccucgggguggccaccgcggccgccgucacggccggcguggcgaucgccaagaccauccgccuggagagcgaggugaccgccaucaagaacgcccugaagaagaccaacgaggccgucuccacgcucggcaacggggugcgggugcuggcgaccgccguccgcgagcugaaggacuucgugagcaagaaccucacccgggccaucaacaagaacaagugcgacaucgccgaccugaagauggccguguccuucagccaguucaaccgccgguuccugaacgucgugcgccaguucuccgacaacgcgggcaucacccccgccaucagccucgaccugaugacggacgccgagcuggcccgggccguguccaacaugcccaccagcgcggggcagaucaagcucaugcuggagaaccgcgccaugguccggcgcaagggcuucggguuccugaucggcguguacggcuccagcgugaucuacaugguccagcuccccaucuucggggugaucgacaccccgugcuggaucgugaaggccgcccccuccugcagcggcaagaaggggaacuacgccugccugcugcgggaggaccagggcugguacugccagaacgcgggcagcaccgucuacuaccccaacgagaaggacugcgagacgcgcggggaccacguguucugcgacaccgccgccggcaucaacgucgccgagcaguccaaggagugcaacaucaacaucagcaccaccaacuaccccugcaagguguccacggggcggcacccgaucagcaugguggcgcucuccccccugggcgcccuggucgccugcuacaagggggugagcugcuccaucggcagcaaccgcgugggcaucaucaagcagcucaacaaggggugcuccuacaucaccaaccaggacgccgacaccgucaccaucgacaacacgguguaccagcugagcaagguggagggcgagcagcacgucaucaaggggcggcccguguccagcuccuucgaccccgugaaguucccggaggaccaguucaacgucgcccuggaccagguguucgagagcaucgagaacucccaggcgcucguggaccagagcaaccgcauccuguccagcgccgagaagggcaacaccggguucaucaucgucaucauccugaucgccgugcucggcuccaccaugauccuggugagcgucuucaucaucaucaagaagaccaagaagcccacgggcgccccccccgagcugagcggggugaccaacaacggcuucaucccgcacaacugaggacuagucccuguucccagagcccacuuuuuuuucuuuuuuugaaauaaaauagccugucuuucagaucucaaaggcucuuuucagagccaccaaaaaaaaaaaaaaaaaaaaaaaaaaaaaaaaaaaaaaaaaaaaaaaaaaaaaaaaaaaaaaaaaaaaaaaaaaaaaaaaaaaaaaaaaaaaaaaaaaaaa

SEQ ID NO: 26983 - RNA, 1892 nt, Artificial Sequence
  HMPV/00-1__AAK62968.2 fusion glycoprotein mRNA gc (variant) R10325
aggagagucccgcagucggcguccagcggcucugcuuguucgugugugugucguugcaggccuuauucaagcuuaccaugagcuggaagguggucaucaucuucucccugcucaucaccccccagcacggccugaaggagagcuaccucgaggaguccugcagcaccaucaccgagggcuaccuguccgugcugcgcacggggugguacaccaacgucuucacccucgaggugggcgacguggagaaccugaccugcgccgacgggcccagccugaucaagacggagcucgaccugaccaaguccgcccugcgggagcuccgcaccgucagcgcggaccagcuggcccgggaggagcagaucgagaacccgcgccggcgccgguucgugcugggcgccaucgcccucgggguggccaccgcggccgccgucacggccggcguggcgaucgccaagaccauccgccuggagagcgaggugaccgccaucaagaacgcccugaagaagaccaacgaggccgucuccacgcucggcaacggggugcgggugcuggcgaccgccguccgcgagcugaaggacuucgugagcaagaaccucacccgggccaucaacaagaacaagugcgacaucgccgaccugaagauggccguguccuucagccaguucaaccgccgguuccugaacgucgugcgccaguucuccgacaacgcgggcaucacccccgccaucagccucgaccugaugacggacgccgagcuggcccgggccguguccaacaugcccaccagcgcggggcagaucaagcucaugcuggagaaccgcgccaugguccggcgcaagggcuucggguuccugaucggcguguacggcuccagcgugaucuacaugguccagcuccccaucuucggggugaucgacaccccgugcuggaucgugaaggccgcccccuccugcagcgagaagaaggggaacuacgccugccugcugcgggaggaccagggcugguacugccagaacgcgggcagcaccgucuacuaccccaacgagaaggacugcgagacgcgcggggaccacguguucugcgacaccgccgccggcaucaacgucgccgagcaguccaaggagugcaacaucaacaucagcaccaccaacuaccccugcaagguguccacggggcggcacccgaucagcaugguggcgcucuccccccugggcgcccuggucgccugcuacaagggggugagcugcuccaucggcagcaaccgcgugggcaucaucaagcagcucaacaaggggugcuccuacaucaccaaccaggacgccgacaccgucaccaucgacaacacgguguaccagcugagcaagguggagggcgagcagcacgucaucaaggggcggcccguguccagcuccuucgaccccgugaaguucccggaggaccaguucaacgucgcccuggaccagguguucgagagcaucgagaacucccaggcgcucguggaccagagcaaccgcauccuguccagcgccgagaagggcaacaccggguucaucaucgucaucauccugaucgccgugcucggcuccaccaugauccuggugagcgucuucaucaucaucaagaagaccaagaagcccacgggcgccccccccgagcugagcggggugaccaacaacggcuucaucccgcacaacugaggacuagucccuguucccagagcccacuuuuuuuucuuuuuuugaaauaaaauagccugucuuucagaucucaaaggcucuuuucagagccaccaaaaaaaaaaaaaaaaaaaaaaaaaaaaaaaaaaaaaaaaaaaaaaaaaaaaaaaaaaaaaaaaaaaaaaaaaaaaaaaaaaaaaaaaaaaaaaaaaaaaa

SEQ ID NO: 26984 - RNA, 1892 nt, Artificial Sequence
  HMPV/00-1__AAK62968.2 fusion glycoprotein mRNA gc (variant) R10326
aggagagucccgcagucggcguccagcggcucugcuuguucgugugugugucguugcaggccuuauucaagcuuaccaugagcuggaagguggucaucaucuucucccugcucaucaccccccagcacggccugaaggagagcuaccucgaggaguccugcagcaccaucaccgagggcuaccuguccgugcugcgcacggggugguacaccaacgucuucacccucgaggugggcgacguggagaaccugaccugcgccgacgggcccagccugaucaagacggagcucgaccugaccaaguccgcccugcgggagcuccgcaccgucagcgcggaccagcuggcccgggaggagcagaucgagaacccgcgccggcgccgguucgugcugggcgccaucgcccucgggguggccaccgcggccgccgucacggccggcguggcgaucgccaagaccauccgccuggagagcgaggugaccgccaucaagaacgcccugaagaagaccaacgaggccgucuccacgcucggcaacggggugcgggugcuggcgaccgccguccgcgagcugaaggacuucgugagcaagaaccucacccgggccaucaacaagaacaagugcgacauccccgaccugaagauggccguguccuucagccaguucaaccgccgguuccugaacgucgugcgccaguucuccgacaacgcgggcaucacccccgccaucagccucgaccugaugacggacgccgagcuggcccgggccguguccaacaugcccaccagcgcggggcagaucaagcucaugcuggagaaccgcgccaugguccggcgcaagggcuucggguuccugaucggcguguacggcuccagcgugaucuacaugguccagcuccccaucuucggggugaucgacaccccgugcuggaucgugaaggccgcccccuccugcagcgagaagaaggggaacuacgccugccugcugcgggaggaccagggcugguacugccagaacgcgggcagcaccgucuacuaccccaacgagaaggacugcgagacgcgcggggaccacguguucugcgacaccgccgccggcaucaacgucgccgagcaguccaaggagugcaacaucaacaucagcaccaccaacuaccccugcaagguguccacggggcggcacccgaucagcaugguggcgcucuccccccugggcgcccuggucgccugcuacaagggggugagcugcuccaucggcagcaaccgcgugggcaucaucaagcagcucaacaaggggugcuccuacaucaccaaccaggacgccgacaccgucaccaucgacaacacgguguaccagcugagcaagguggagggcgagcagcacgucaucaaggggcggcccguguccagcuccuucgaccccgugaaguucccggaggaccaguucaacgucgcccuggaccagguguucgagagcaucgagaacucccaggcgcucguggaccagagcaaccgcauccuguccagcgccgagaagggcaacaccggguucaucaucgucaucauccugaucgccgugcucggcuccaccaugauccuggugagcgucuucaucaucaucaagaagaccaagaagcccacgggcgccccccccgagcugagcggggugaccaacaacggcuucaucccgcacaacugaggacuagucccuguucccagagcccacuuuuuuuucuuuuuuugaaauaaaauagccugucuuucagaucucaaaggcucuuuucagagccaccaaaaaaaaaaaaaaaaaaaaaaaaaaaaaaaaaaaaaaaaaaaaaaaaaaaaaaaaaaaaaaaaaaaaaaaaaaaaaaaaaaaaaaaaaaaaaaaaaaaaa

SEQ ID NO: 26985 - RNA, 1837 nt, Artificial Sequence
  HMPV/NL/1/99__AAQ90145.1 fusion glycoprotein mRNA gc (F0)
aggagaaagcuuaccaugagcuggaaggugaugaucaucaucucccugcucaucaccccccagcacggccugaaggagagcuaccucgaggaguccugcagcaccaucaccgagggcuaccuguccgugcugcgcacggggugguacaccaacgucuucacccucgaggugggcgacguggagaaccugaccugcacggacgggcccagccugaucaagaccgagcucgaccugaccaaguccgcccugcgggagcucaagaccgucagcgccgaccagcuggcgcgcgaggagcagaucgagaacccgcggcagucccgcuucgugcugggcgccaucgcccucgggguggccacggccgcggccgucaccgccggcaucgccaucgcgaagaccauccggcuggagagcgaggugaacgccaucaagggcgcccugaagcagaccaacgaggccguguccacgcucgggaacggcguccgcgugcuggccaccgcggugcgggagcugaaggaguucgucagcaagaaccucaccuccgccaucaaccgcaacaagugcgacaucgccgaccugaagauggccgugagcuucucccaguucaaccggcgcuuccugaacgugguccggcaguucagcgacaacgccgggaucacccccgcgaucucccucgaccugaugacggacgccgagcuggcccgcgccgugagcuacaugcccaccuccgccggccagaucaagcucaugcuggagaaccgggcgauggugcgccggaagggguucggcauccugaucggcgucuacgggagcuccgugaucuacauggugcagcuccccaucuucggcgucaucgacaccccgugcuggaucaucaaggccgcccccagcugcagcgagaagaacgggaacuacgccugccugcugcgcgaggaccagggcugguacugcaagaacgccggcuccaccguguacuaccccaacgagaaggacugcgagacgcggggggaccacguguucugcgacaccgcggccggcaucaacgucgccgagcagagccgcgagugcaacaucaacaucuccaccaccaacuaccccugcaaggugagcacggggcggcacccgaucuccauggucgcccucagcccccugggcgcgcugguggccugcuacaaggggguguccugcagcaucggcuccaacugggucggcaucaucaagcagcuccccaaggggugcagcuacaucaccaaccaggacgccgacaccgugaccaucgacaacacgguguaccagcuguccaaggucgagggcgagcagcacgugaucaaggggcgccccgugagcuccagcuucgacccgaucaaguuccccgaggaccaguucaacgucgcccuggaccagguguucgaguccaucgagaacagccaggcccucguggaccaguccaacaagauccugaacagcgcggagaagggcaacaccggguucaucaucgucgugauccugguggccguccucggccugaccaugaucuccgugagcaucaucaucaucaucaagaagacccggaagcccacgggcgcccccccggagcugaacggggugaccaacggcggguucaucccccacagcugaggacuaguuauaagacugacuagcccgaugggccucccaacgggcccuccuccccuccuugcaccgagauuaauaaaaaaaaaaaaaaaaaaaaaaaaaaaaaaaaaaaaaaaaaaaaaaaaaaaaaaaaaaaaaaaaugcaucccccccccccccccccccccccccccccccaaaggcucuuuucagagccaccagaauu

SEQ ID NO: 26986 - RNA, 1837 nt, Artificial Sequence
  HMPV/NL/1/99__AAQ90145.1 fusion glycoprotein mRNA gc (variant)
aggagaaagcuuaccaugagcuggaaggugaugaucaucaucucccugcucaucaccccccagcacggccugaaggagagcuaccucgaggaguccugcagcaccaucaccgagggcuaccuguccgugcugcgcacggggugguacaccaacgucuucacccucgaggugggcgacguggagaaccugaccugcacggacgggcccagccugaucaagaccgagcucgaccugaccaaguccgcccugcgggagcucaagaccgucagcgccgaccagcuggcgcgcgaggagcagaucgagaacccgcggcggcgccgcuucgugcugggcgccaucgcccucgggguggccacggccgcggccgucaccgccggcaucgccaucgcgaagaccauccggcuggagagcgaggugaacgccaucaagggcgcccugaagcagaccaacgaggccguguccacgcucgggaacggcguccgcgugcuggccaccgcggugcgggagcugaaggaguucgucagcaagaaccucaccuccgccaucaaccgcaacaagugcgacaucgccgaccugaagauggccgugagcuucucccaguucaaccggcgcuuccugaacgugguccggcaguucagcgacaacgccgggaucacccccgcgaucucccucgaccugaugacggacgccgagcuggcccgcgccgugagcuacaugcccaccuccgccggccagaucaagcucaugcuggagaaccgggcgauggugcgccggaagggguucggcauccugaucggcgucuacgggagcuccgugaucuacauggugcagcuccccaucuucggcgucaucgacaccccgugcuggaucaucaaggccgcccccagcugcagcgagaagaacgggaacuacgccugccugcugcgcgaggaccagggcugguacugcaagaacgccggcuccaccguguacuaccccaacgagaaggacugcgagacgcggggggaccacguguucugcgacaccgcggccggcaucaacgucgccgagcagagccgcgagugcaacaucaacaucuccaccaccaacuaccccugcaaggugagcacggggcggcacccgaucuccauggucgcccucagcccccugggcgcgcugguggccugcuacaaggggguguccugcagcaucggcuccaacugggucggcaucaucaagcagcuccccaaggggugcagcuacaucaccaaccaggacgccgacaccgugaccaucgacaacacgguguaccagcuguccaaggucgagggcgagcagcacgugaucaaggggcgccccgugagcuccagcuucgacccgaucaaguuccccgaggaccaguucaacgucgcccuggaccagguguucgaguccaucgagaacagccaggcccucguggaccaguccaacaagauccugaacagcgcggagaagggcaacaccggguucaucaucgucgugauccugguggccguccucggccugaccaugaucuccgugagcaucaucaucaucaucaagaagacccggaagcccacgggcgcccccccggagcugaacggggugaccaacggcggguucaucccccacagcugaggacuaguuauaagacugacuagcccgaugggccucccaacgggcccuccuccccuccuugcaccgagauuaauaaaaaaaaaaaaaaaaaaaaaaaaaaaaaaaaaaaaaaaaaaaaaaaaaaaaaaaaaaaaaaaaugcaucccccccccccccccccccccccccccccccaaaggcucuuuucagagccaccagaauu

SEQ ID NO: 26987 - RNA, 1837 nt, Artificial Sequence
  HMPV/NL/1/99__AAQ90145.1 fusion glycoprotein mRNA gc (variant)
aggagaaagcuuaccaugagcuggaaggugaugaucaucaucucccugcucaucaccccccagcacggccugaaggagagcuaccucgaggaguccugcagcaccaucaccgagggcuaccuguccgugcugcgcacggggugguacaccaacgucuucacccucgaggugggcgacguggagaaccugaccugcacggacgggcccagccugaucaagaccgagcucgaccugaccaaguccgcccugcgggagcucaagaccgucagcgccgaccagcuggcgcgcgaggagcagaucgagaacccgcggcggcgccgcuucgugcugggcgccaucgcccucgggguggccacggccgcggccgucaccgccggcaucgccaucgcgaagaccauccggcuggagagcgaggugaacgccaucaagggcgcccugaagcagaccaacgaggccguguccacgcucgggaacggcguccgcgugcuggccaccgcggugcgggagcugaaggaguucgucagcaagaaccucaccuccgccaucaaccgcaacaagugcgacauccccgaccugaagauggccgugagcuucucccaguucaaccggcgcuuccugaacgugguccggcaguucagcgacaacgccgggaucacccccgcgaucucccucgaccugaugacggacgccgagcuggcccgcgccgugagcuacaugcccaccuccgccggccagaucaagcucaugcuggagaaccgggcgauggugcgccggaagggguucggcauccugaucggcgucuacgggagcuccgugaucuacauggugcagcuccccaucuucggcgucaucgacaccccgugcuggaucaucaaggccgcccccagcugcagcgagaagaacgggaacuacgccugccugcugcgcgaggaccagggcugguacugcaagaacgccggcuccaccguguacuaccccaacgagaaggacugcgagacgcggggggaccacguguucugcgacaccgcggccggcaucaacgucgccgagcagagccgcgagugcaacaucaacaucuccaccaccaacuaccccugcaaggugagcacggggcggcacccgaucuccauggucgcccucagcccccugggcgcgcugguggccugcuacaaggggguguccugcagcaucggcuccaacugggucggcaucaucaagcagcuccccaaggggugcagcuacaucaccaaccaggacgccgacaccgugaccaucgacaacacgguguaccagcuguccaaggucgagggcgagcagcacgugaucaaggggcgccccgugagcuccagcuucgacccgaucaaguuccccgaggaccaguucaacgucgcccuggaccagguguucgaguccaucgagaacagccaggcccucguggaccaguccaacaagauccugaacagcgcggagaagggcaacaccggguucaucaucgucgugauccugguggccguccucggccugaccaugaucuccgugagcaucaucaucaucaucaagaagacccggaagcccacgggcgcccccccggagcugaacggggugaccaacggcggguucaucccccacagcugaggacuaguuauaagacugacuagcccgaugggccucccaacgggcccuccuccccuccuugcaccgagauuaauaaaaaaaaaaaaaaaaaaaaaaaaaaaaaaaaaaaaaaaaaaaaaaaaaaaaaaaaaaaaaaaaugcaucccccccccccccccccccccccccccccccaaaggcucuuuucagagccaccagaauu

SEQ ID NO: 26988 - RNA, 1837 nt, Artificial Sequence
  HMPV/00-1__AAK62968.2 fusion glycoprotein mRNA gc (F0)
aggagaaagcuuaccaugagcuggaagguggucaucaucuucucccugcucaucaccccccagcacggccugaaggagagcuaccucgaggaguccugcagcaccaucaccgagggcuaccuguccgugcugcgcacggggugguacaccaacgucuucacccucgaggugggcgacguggagaaccugaccugcgccgacgggcccagccugaucaagacggagcucgaccugaccaaguccgcccugcgggagcuccgcaccgucagcgcggaccagcuggcccgggaggagcagaucgagaacccgcgccagucccgguucgugcugggcgccaucgcccucgggguggccaccgcggccgccgucacggccggcguggcgaucgccaagaccauccgccuggagagcgaggugaccgccaucaagaacgcccugaagaagaccaacgaggccgucuccacgcucggcaacggggugcgggugcuggcgaccgccguccgcgagcugaaggacuucgugagcaagaaccucacccgggccaucaacaagaacaagugcgacaucgccgaccugaagauggccguguccuucagccaguucaaccgccgguuccugaacgucgugcgccaguucuccgacaacgcgggcaucacccccgccaucagccucgaccugaugacggacgccgagcuggcccgggccguguccaacaugcccaccagcgcggggcagaucaagcucaugcuggagaaccgcgccaugguccggcgcaagggcuucggguuccugaucggcguguacggcuccagcgugaucuacaugguccagcuccccaucuucggggugaucgacaccccgugcuggaucgugaaggccgcccccuccugcagcggcaagaaggggaacuacgccugccugcugcgggaggaccagggcugguacugccagaacgcgggcagcaccgucuacuaccccaacgagaaggacugcgagacgcgcggggaccacguguucugcgacaccgccgccggcaucaacgucgccgagcaguccaaggagugcaacaucaacaucagcaccaccaacuaccccugcaagguguccacggggcggcacccgaucagcaugguggcgcucuccccccugggcgcccuggucgccugcuacaagggggugagcugcuccaucggcagcaaccgcgugggcaucaucaagcagcucaacaaggggugcuccuacaucaccaaccaggacgccgacaccgucaccaucgacaacacgguguaccagcugagcaagguggagggcgagcagcacgucaucaaggggcggcccguguccagcuccuucgaccccgugaaguucccggaggaccaguucaacgucgcccuggaccagguguucgagagcaucgagaacucccaggcgcucguggaccagagcaaccgcauccuguccagcgccgagaagggcaacaccggguucaucaucgucaucauccugaucgccgugcucggcuccaccaugauccuggugagcgucuucaucaucaucaagaagaccaagaagcccacgggcgccccccccgagcugagcggggugaccaacaacggcuucaucccgcacaacugaggacuaguuauaagacugacuagcccgaugggccucccaacgggcccuccuccccuccuugcaccgagauuaauaaaaaaaaaaaaaaaaaaaaaaaaaaaaaaaaaaaaaaaaaaaaaaaaaaaaaaaaaaaaaaaaugcaucccccccccccccccccccccccccccccccaaaggcucuuuucagagccaccagaauu

SEQ ID NO: 26989 - RNA, 1837 nt, Artificial Sequence
  HMPV/00-1__AAK62968.2 fusion glycoprotein mRNA gc (variant)
aggagaaagcuuaccaugagcuggaagguggucaucaucuucucccugcucaucaccccccagcacggccugaaggagagcuaccucgaggaguccugcagcaccaucaccgagggcuaccuguccgugcugcgcacggggugguacaccaacgucuucacccucgaggugggcgacguggagaaccugaccugcgccgacgggcccagccugaucaagacggagcucgaccugaccaaguccgcccugcgggagcuccgcaccgucagcgcggaccagcuggcccgggaggagcagaucgagaacccgcgccggcgccgguucgugcugggcgccaucgcccucgggguggccaccgcggccgccgucacggccggcguggcgaucgccaagaccauccgccuggagagcgaggugaccgccaucaagaacgcccugaagaagaccaacgaggccgucuccacgcucggcaacggggugcgggugcuggcgaccgccguccgcgagcugaaggacuucgugagcaagaaccucacccgggccaucaacaagaacaagugcgacaucgccgaccugaagauggccguguccuucagccaguucaaccgccgguuccugaacgucgugcgccaguucuccgacaacgcgggcaucacccccgccaucagccucgaccugaugacggacgccgagcuggcccgggccguguccaacaugcccaccagcgcggggcagaucaagcucaugcuggagaaccgcgccaugguccggcgcaagggcuucggguuccugaucggcguguacggcuccagcgugaucuacaugguccagcuccccaucuucggggugaucgacaccccgugcuggaucgugaaggccgcccccuccugcagcgagaagaaggggaacuacgccugccugcugcgggaggaccagggcugguacugccagaacgcgggcagcaccgucuacuaccccaacgagaaggacugcgagacgcgcggggaccacguguucugcgacaccgccgccggcaucaacgucgccgagcaguccaaggagugcaacaucaacaucagcaccaccaacuaccccugcaagguguccacggggcggcacccgaucagcaugguggcgcucuccccccugggcgcccuggucgccugcuacaagggggugagcugcuccaucggcagcaaccgcgugggcaucaucaagcagcucaacaaggggugcuccuacaucaccaaccaggacgccgacaccgucaccaucgacaacacgguguaccagcugagcaagguggagggcgagcagcacgucaucaaggggcggcccguguccagcuccuucgaccccgugaaguucccggaggaccaguucaacgucgcccuggaccagguguucgagagcaucgagaacucccaggcgcucguggaccagagcaaccgcauccuguccagcgccgagaagggcaacaccggguucaucaucgucaucauccugaucgccgugcucggcuccaccaugauccuggugagcgucuucaucaucaucaagaagaccaagaagcccacgggcgccccccccgagcugagcggggugaccaacaacggcuucaucccgcacaacugaggacuaguuauaagacugacuagcccgaugggccucccaacgggcccuccuccccuccuugcaccgagauuaauaaaaaaaaaaaaaaaaaaaaaaaaaaaaaaaaaaaaaaaaaaaaaaaaaaaaaaaaaaaaaaaaugcaucccccccccccccccccccccccccccccccaaaggcucuuuucagagccaccagaauu

SEQ ID NO: 26990 - RNA, 1837 nt, Artificial Sequence
  HMPV/00-1__AAK62968.2 fusion glycoprotein mRNA gc (variant)
aggagaaagcuuaccaugagcuggaagguggucaucaucuucucccugcucaucaccccccagcacggccugaaggagagcuaccucgaggaguccugcagcaccaucaccgagggcuaccuguccgugcugcgcacggggugguacaccaacgucuucacccucgaggugggcgacguggagaaccugaccugcgccgacgggcccagccugaucaagacggagcucgaccugaccaaguccgcccugcgggagcuccgcaccgucagcgcggaccagcuggcccgggaggagcagaucgagaacccgcgccggcgccgguucgugcugggcgccaucgcccucgggguggccaccgcggccgccgucacggccggcguggcgaucgccaagaccauccgccuggagagcgaggugaccgccaucaagaacgcccugaagaagaccaacgaggccgucuccacgcucggcaacggggugcgggugcuggcgaccgccguccgcgagcugaaggacuucgugagcaagaaccucacccgggccaucaacaagaacaagugcgacauccccgaccugaagauggccguguccuucagccaguucaaccgccgguuccugaacgucgugcgccaguucuccgacaacgcgggcaucacccccgccaucagccucgaccugaugacggacgccgagcuggcccgggccguguccaacaugcccaccagcgcggggcagaucaagcucaugcuggagaaccgcgccaugguccggcgcaagggcuucggguuccugaucggcguguacggcuccagcgugaucuacaugguccagcuccccaucuucggggugaucgacaccccgugcuggaucgugaaggccgcccccuccugcagcgagaagaaggggaacuacgccugccugcugcgggaggaccagggcugguacugccagaacgcgggcagcaccgucuacuaccccaacgagaaggacugcgagacgcgcggggaccacguguucugcgacaccgccgccggcaucaacgucgccgagcaguccaaggagugcaacaucaacaucagcaccaccaacuaccccugcaagguguccacggggcggcacccgaucagcaugguggcgcucuccccccugggcgcccuggucgccugcuacaagggggugagcugcuccaucggcagcaaccgcgugggcaucaucaagcagcucaacaaggggugcuccuacaucaccaaccaggacgccgacaccgucaccaucgacaacacgguguaccagcugagcaagguggagggcgagcagcacgucaucaaggggcggcccguguccagcuccuucgaccccgugaaguucccggaggaccaguucaacgucgcccuggaccagguguucgagagcaucgagaacucccaggcgcucguggaccagagcaaccgcauccuguccagcgccgagaagggcaacaccggguucaucaucgucaucauccugaucgccgugcucggcuccaccaugauccuggugagcgucuucaucaucaucaagaagaccaagaagcccacgggcgccccccccgagcugagcggggugaccaacaacggcuucaucccgcacaacugaggacuaguuauaagacugacuagcccgaugggccucccaacgggcccuccuccccuccuugcaccgagauuaauaaaaaaaaaaaaaaaaaaaaaaaaaaaaaaaaaaaaaaaaaaaaaaaaaaaaaaaaaaaaaaaaugcaucccccccccccccccccccccccccccccccaaaggcucuuuucagagccaccagaauu

SEQ ID NO: 26991 - RNA, 1786 nt, Artificial Sequence
  HMPV/TN/92-4__ABM67072.1 fusion glycoprotein mRNA gc (F0)
gggaaauaagagagaaaagaagaguaagaagaaauauaagagccaccaugagcuggaagguggugauuaucuucagccugcugauuacaccucaacacggccugaaggagagcuaccuggaagagagcugcuccaccaucaccgagggcuaccugagcgugcugcggaccggcugguacaccaacguguucacccuggaggugggcgacguggagaaccugaccugcagcgacggcccuagccugaucaagaccgagcuggaccugaccaagagcgcucugagagagcugaagaccguguccgccgaccagcuggccagagaggaacagaucgagaacccucggcagagcagauucgugcugggcgccaucgcucugggagucgccgcugccgcugcagugacagcuggaguggccauugcuaagaccaucagacuggaaagcgaggugacagccaucaacaaugcccugaagaagaccaacgaggccgugagcacccugggcaauggagugagagugcuggccacagccgugcgggagcugaaggacuucgugagcaagaaccugaccagagccaucaacaagaacaagugcgacaucgaugaccugaagauggccgugagcuucucccaguucaacagacgguuccugaacguggugagacaguucuccgacaacgcuggaaucacaccugccauuagccuggaccugaugaccgacgccgagcuggcuagagccgugcccaacaugcccaccagcgcuggccagaucaagcugaugcuggagaacagagccauggugcggagaaagggcuucggcauccugauugggguguauggaagcuccgugaucuacauggugcagcugcccaucuucggcgugaucgacacacccugcuggaucgugaaggccgcuccuagcugcuccgagaagaaaggaaacuaugccugucugcugagagaggaccagggcugguacugccagaacgccggaagcacaguguacuaucccaacgagaaggacugcgagaccagaggcgaccacguguucugcgacaccgcugccggaaucaacguggccgagcagagcaaggagugcaacaucaacaucagcacaaccaacuaccccugcaaggugagcaccggacggcaccccaucagcaugguggcucugagcccucugggcgcucugguggccugcuauaagggcguguccuguagcaucggcagcaaucgggugggcaucaucaagcagcugaacaagggaugcuccuacaucaccaaccaggacgccgacaccgugaccaucgacaacaccguguaccagcugagcaagguggagggcgagcagcacgugaucaagggcagacccgugagcuccagcuucgaccccaucaaguucccugaggaccaguucaacguggcccuggaccagguguuugagaacaucgagaacagccaggcccugguggaccagagcaacagaauccuguccagcgcugagaagggcaacaccggcuucaucauugugaucauucugaucgccgugcugggcagcuccaugauccuggugagcaucuucaucauuaucaagaagaccaagaaacccaccggagccccuccugagcugagcggcgugaccaacaauggcuucauuccccacaacugaugauaauaggcuggagccucgguggccaugcuucuugccccuugggccuccccccagccccuccuccccuuccugcacccguacccccguggucuuugaauaaagucugagugggcggc
